United States Patent Application Publication US 2026/0325625 A1, published October 22, 2026 (application 19/484,594).

The application's sequence listing, which the Patent Office published only in electronic form, follows.

SEQUENCE LISTING (55 sequences)

SEQ ID NO: 1 - DNA, 14890 bp, synthetic construct
  source 1..14890: mol_type = other DNA
acgcgaaaaaatgcataacaaaactatcaacctgaaaaaagttaggacaagtgaagattgctagtcccaaagaccagaatcatgggctgtaatgtgatgatggagcttgattatggtggacgagctgcatggctggcattccacataaccaactttgataggtcagatttggaaactatcctaagaggtgctagggtgtgcaatacatggcaagatcagagactctccgtgtaccttgtgggaagggattgcaatttgttaagaccatttgtgcaagctgccaaatttatccataatactaggagaggccaaacattaacacattggttcacaaaaaatatcgtgtttagttctacagggcaagagacagagcctcccattgaccccacatgtgagctgttggtagagctgatcagtggttaagatgacagcacattatgtagttaattaaaacaaagggtaggacaagtcctaatgtccacagctatgaacaagttcactcagaccatctctaaacctgccactatcttgaatatttcagacagtgaagagtcgggcgatgaggcaggggtgggcaaggtgtcccgtaccacacagagctcagagaggtggcttgatttgctcattgaaaagttccagccgagcctacaaaacatcactagatacatcaactggaacttcatcaggatctgcaatgataggcttaaaaaagaaaaaatggggtacattgaggccaagcaatatgtggaagacatggcttggatggtgatagcatctgaggcagacagcattgagtggaagtgcataaggaggcaggagaaagtgactggggtgaaatacccaaagttcttctttgtacaacacaaagaggactggattgagtgcacaggatgcattccgtacccaggccatgacttgatctatgatgaggatgatgatgactgagctgactcagatcactccaaccagcagagagatccaccacctatagcaagtgatgtagtatttagtctatgattagttatagaaaaacattaggataaatacacatcctaggccgggccaaaatgtctctagacagattgaagctcaatgatgtctcaaacaaggatagcctgctgtccaactgcaaatacagtgttaccagatccacaggcgatgtaaccagtgtgtctggtcatgctatgcagaaagcccttgcaaggacactcggcatgttcttacttactgccttcaaccgttgcgaagaagtggcagaaatagggctccaatatgccatgtccttgctaggcagagatgatagcatcaagatattaagagaagccggctacaatgtaaaatgtgtggacacacagctcaaggactttacaatcaaattacaaggaaaggaatacaaaatacaagtcctagatatagtgggaatagatgcagccaatttagctgatctagagatacaagccagaggagtggtagcaaaagaactcaaaacaggagccaggctacctgacaatcggaggcatgatgcaccagattgtggtgtgatagttctctgtattgcagcattagttgtttccaaattagctgcaggggacaggggaggacttgatgctgtggaaagaagggctttaaatgtgctgaaagccgagaaagccaggtaccccaacatggaggtcaagcagatagctgaaagtttttatgatctgtttgaaaggaagccttattacattgatgtcttcatcacttttggcctggcccagtctagtgtcaagggaggcagcaaagttgaggggctgttttcaggtctcttcatgaatgcatacggggcaggacaagttatgctgaggtggggtttactggcaaaatctgtcaagaacatcatgctaggccatgctagtgtacaagctgagatggaacaggtggttgaggtttacgaatatgctcagaagcaaggaggggaggcaggattctatcacatcagaaataatccaaaagcttcacttctctctttgaccaattgtcctaatttcaccagtgttgtgcttggcaatgctgcaggtttaggcatcatagggtcatataagggtgctcctaggaatagagaactctttgatgctgccaaagattatgcagaaagattaaaggacaacaatgtaattaactacagtgcattaaacttgactgcagaagaaagagagctgatcagccagcagctgaacattgttgatgacactcctgatgatgatatttaattaaaactggaaaatgtaggataaatatggagaaattcgcccccgaatttgttggcgaggatgctaacaagaaggcagaggagtttctcaaacatagatccttcccttcggaaaaaccactagctggtataccgaacactgccactcatgtcaccaaatataacatgccccctatattgcgtagctcattcaaactcccttccccgagagttgctgcaaatcttactgaaccctctgctccccctaccactccaccacccacacctccccagaacaaggaagagcagcccaaagagtctgatgttgacattgagactatgcatgtctgtaaggttcctgacaatccggaacacagcaagaagccatgctgctcagatgataccgatactaagaaaactaggaagccgatggtcacctttgtggaacccgaggagaaatttgtcggattgggagctagcttgtacagggagaccatgcagacctttgctgctgatggttatgatgaagaaagcaacctatcgtttgaggagactaaccaagagccgggttcttcatctgtagaacaaagactagatagaatagaggagaaattgtcctacataataggccttttaaacaccataatggtagcgactgctggacctaccactgctagagatgagattagagatgcccttataggcactagagaagaacttattgagatgatcaagtctgacatcttgactgtcaatgacagaatagtggccatggagaagctcagagatgaggaatgctccagagctgacactgatgatggatcagcctgttatttaacagacagagcaaggatactagataagatagtgtccagcaatgctgaagaggctaaggaagatttggatgttgatgacatcatgggcattaatttttagttaattaaaataacaacaggacaaataatggaggcctacttggtagagatgtaccatggtgtcccatatacagctgcagtacagctaaacttggttgaaaaacattcagccaacatatcactaactgtgtggataccgatgtttcaaacatctctaccaaagaactccgttatggacctgctacatgatgttacagtcatttgtacacagatatcaacagtgcatggtcccatgatcaaggtagatctgagctcttccaatgcaggtttagctaccatgccaaggcaattcttgataaatgctatcatagctttggatgactggggcaacatggattacgaagtgcctgttgcttttgataaaaagagcttctgtgtgacaattcttaagcctaaaaacatgctttacactgtacccagcattactcccactaatcgacctactcatgagctgatagctgtctgctctttccataacagggtaacattaaagtcattcaatatacctgtcttcatcagagcactgtctatcagacagcaggaccttgatagtgtggagcaggctataagctccgatgtggaccatgctataacaacagctagggtggctccctatgcagggcttacacttgtgatcaacatcacatccaccaaaggagcattcaaactgctaaaggcaggtagtcagattcttgcagaactgggtccctatctgacgcaggtgagcctacatgatgtgattatgaactggaaacatacaggcacttcctacatactcaagagctcctcaacaagtggatgaaaaagagaaagtcaccattgatcagctcaatccacaactacaaccccacgatttcacacagcacaacaaccaccgccaccaacatccacatgacaaccacacatacacacccacatacatatatacacatatcttagttaaataaaatcaggataaataatggatcctaacatgacctcacaccagatcaccctcgagatcaacatgaccagcagccgtattggcacatacactacaccagccccaacagctcttctccttgcatgtgccgtcatcaacacagtgtgtgcgctgataatggcctgcagcagtagaagcactgccacatcaggcattgtcagcagccaatgcacagttcatcccaatcaccctccaccaagttatggcgtcaatgtaactggtctgccgggtaacctatactcaaggaacactacataacattataaataacagaaattatccttcaataaaccccaggccagacagctttaccctgctagacgattcaatcagcccttgcagtatgtcgtctagttaacaaaaaaccggtaggataagtactatcctattggaaccaaacgagacctgtagagcagctcacacaagagaaccacaagctgacttcacctagtatgggaaggaacttagaagtgagtggcagcattaccaatttgaactttgagagaactcagcatcctgacacatttaggactgttgtaaaagtgaaccaaatgtgtaagcttattgcaggtgtgctcacaagtgctgctgtggcagtttgtgtgggggtcataatgtattctgttttcacatcaaaccacaaggccaactccacgcagaatgccacgacccggaacagcacatccacccctccccaaccaaccgccggtctgcccaccacagagcaagggaccatccccagattcaccaaaccccccaccaaaaccgccacccaccatgagatcacagagcccgtcaaaatggcaacaccttcagaggatccctaccaatgctccagcaatggttatttggaccgacctgatttacctgaaaatttcaaactcgtattggatgttatatgcaagcctccaggtcctgaacatcacaacaccagctgttatgagaaacgtgaaatcaacccaggaagtgtttgccctgatcttgtaacaatgaaggcaaacatgggcttaaacaatggtggtggggaggatgctgcaccttatatagaggttaccaccctttctacgtactccaacaaaagggcaatgtgtgtccacaatgggtgtgatcaaggcttctgtttcttcctttctggtttaagcactgatcaggagagagctgtgctagagcttggaggtcaacaggctatcatggagttgcattatgattcctactggaaacactattggagtaactctaattgtgttgttcccagaacaaactgcaacctgacagaccaaactgagattttgtttcctaggtttaacaacaagaatcagtctcagtgtaccacctgtgcagattcagctggcctagataacaaattttatctcacatgtgatgggcttttaagaaccctccctctagttggactacccagcctaagtcctcaggcttacaaagctgtacccacacaaactacaggcaccaccacggcaccaacatcagagacgaggcacccaacccctgcacccaggaggtccaaacctctcagtcggaagaagagagctttatgtggtgtagactcaagcagagaacccaaaccaacaatgccttactggtgtcctatgctccaattatttccaaggaggtctaattcttaagtgacctattcctgaattaacttcagaataagtaccaaccttatcagtagttaatgaaaactaagctttgatataataggacaaatatgattcctggcaggatctttctagtccttctggtgatcttcaacaccaagccaattcacccaaatacattaacagaaaaattctatgagtccacatgtagtgttgagactgcaggttataagagtgcccttagaacaggttggcatatgacagttatgtcaattaagttgtctcaaataaatattgagtcatgcaagagcagcaactcgttattggctcatgagcttgcaatctatagtagtgcagtggatgaattgagaacgttatcatccaatgccttgaagtccaaaaggaagaagaggttcctcggtttgattcttggtctcggagctgcagtcactgccggggtggctttagccaagacagtgcaacttgaaagtgagattgcattgattagagatgcagtgagaaatacaaatgaggctgttgttagcctaaccaacggcatgtcagtgttggctaaagtggtggatgatttgaaaaacttcatatctaaagaattactcccaaaaataaaccgagtctcttgtgatgtgcacgacatcactgccgtcattagattccaacagctcaacaaaagacttttggaagtatctcgtgaattttcatctaatgcaggattaacacacactgtttcatcttttatgttaacagaccgggaactcacctccattgtaggcggcatggctgtttcagcaggccaaaaagagataatgctatctagcaaagctataatgagaagaaatgggttagcaatattaagttcagtcaacgctgacacactggtttatgtaatacaactcccattatttggtgttatggacacagattgttgggtaataagaagttctatagactgtcataacatagcagacaagtatgcttgtttggctagagctgataatggctggtattgtcacaatgctggctcattatcatacttcccgtcgccaacggattgtgagatccacaatgggtatgctttctgtgacactctaaaaagtctaactgtacctgtaacatcacgagaatgcaactcaaacatgtataccactaactacgattgtaagatttccacaagtaaaacttatgtgagtacagcggtactgactacaatgggttgcttggtatcttgttatggtcataacagttgcacagtcatcaataatgacaaaggtataataaggactctgccagatggttgccactacatctccaacaaaggtgtggacagggttcaagtaggtaacactgtttactatcttagcaaagaagttggcaagtcaattgttgtcagaggggaaccattggtcttgaaatatgaccctttgagtttccctgacgataaatttgatgttgctataagagatgtggagcatagcatcaatcagacacgcacattcttgaaggcctctgatcagttattggacttaagtgaaaacagagagaataaaaatttaaacaagtcatatatactaacaactctgctcttcgttgtaatgcttattataataatggctgtcatagggttcattctgtataaggtattgaaaatgatcagagacaacaagttgaaatccaaaagtacacctggcctcacagttttatcatgacaattgtaccaaaccataattgagttagttaattaaaaacttaggataagtgacaatccagacccaacacctctttcaactctcaaggataaggtaggatgagtgtgagaccttgcaaatttgaggttcaagggttttgttccagagggaggaattgcaagtatagtcataaatattgggaatggcctttgaaaactcttatgctcaggcagaactacatgcttaataggatttataggttcctcgacaccaacacagatgcaatgtcagatgtcagcggatttgatgcaccacaaaggactgctgagtatgccttgggaaccataggtgtgctgaaaagttacctggaaaaaactaacaacatcactaaatcaatagcttgtggcagtttgatcactgtattgcagaacttggatgttggtctagtaatacaagcaagagatagcaacactgaggacaccaattacttgagaagttgcaacactatactgtcttatatagacaagatacacaagaagagacaaattattcacattctcaaaagactgccagtaggagtactatgcaatctgatccaatctgtcatctccatcgaggagaagataaattcttctatgaaaacagaatgataaggctgcctaaatactatccagccatactgcataagatgtatattattagagtaaatagaaacctcacttacgatgggtctggaccatccacaataatagatgcaggaaagtctgtggtgtggaatcgtgttgatgtgatagcttgtgtgaaagaggccttgtgctgcatagaattcagctggaataaccaagtgatcatagactttgattatagccaggccagatgatgtggactgtattcctttttttgtcagtaatcagttattaacccaaaattgttaattatgtagactttaagttaactaacttcatgttaattcaatagttatataaaaaaatattcgaattaggatcaatatggatcctattgatgaacaagaagttaatgtgtacttgccggatagctacttaaagggtgttatatcttttagtgaaactaatgctcttggcagctgtatcattggtagacctttcttgaaggatgactttactgccactacttcaatccgtaaccccctaattgaacataaaagaataagggacactaaattagtaaaaaatattgtttcaaaccctcaatataggttagtggagcctctccaaatgcagcatgagctcttgagtgtactatcgcccaatttcatattgcacactgccaacttaaggaaaattatacaaagaagtgttgacataacagataaaaagttgaaccccattttgcacattttgaatcttaattctcctaaccaagagggtaaggtgtcggaacggctaactaggctaattaagaaacatctctctcacatacctaattgggtaagcagctggtacaatatatgggtcaatcttaacaacttactgcaggagtaccgttcaaaggaagttatagaccataactgtgttctgactaggcaattgtctggaagtttcatacatgtggtcatgagtcaatatggagttgtgataattagcaaaaaaagtaaaagatatacaatgtgtacttataaccaattcctaacctggaaggaccttgccttgagcagatttaatgccaattatgtggtctggctaagtaatgtgttaaacacactcaacgaggggttgggattaaggtgtagattaaaaggtcatctgctcagtaagttgtacatttccactgacatctttttatcttcaacatctaatgaattttataatgtggtcaaggaatttgagggcttcatcatgtcactgatattgaaacaaactgaggaagccttatttagcacaaggttttataataacatgttgaacaacttaattgatgccattgatagggctcgactagagtatctggcccgctgtgccaattcagctgccaggattaatttacctagtacagatgttatgatagcatcattgggtgatatcttatctttgataaacgttttaggtgaatccaaccttaacaacttaagtgagttatattttatcttcaggatatttggtcaccctatggttgatgagaggaaggccatggatgcagtcagagataactgttgtgaaacaaagtttctgacggctaagaaccttgcatcgttaagaggagcatatgtttatagaattatcaaaggattcgtagcaaattataacaggtggccttacataaaaactagagtttgccttacaccaacatggattaactatcttgacaccaattcatgtccctcattattagagatgacagaagatgattttattgtgttagctggagtgcactttataagagaattccacatcccaaagctaactgatctggagattatattaaatgacaaggccatatctcctccaaaatcactcatttggtcatgctttccaaaaaactacatacctcaggttatacaagatgagtatgcccggaggtattgtagagctaaagcacctttgaagacaagacgtgtcttggagttctacttacaggacaaggatttcaagttggatcagctccatagagtagtagtgaaccaggactaccttaatgataaagaacatataatttctttaacaggaaaagaaagagagttgggtgttggtaggatgtttgccatgcaacctgggaagcagaggcaagtccaaattttagcagagaagctgttggctgataacatcctgcaattctttccggagacactgactagatacggtgatttggagctgcaaaagatactagagttaaaagctggactttcaaataaaaatgacagatctaaagactcctacaataattatataagtaggtgctcattaattactgatttaagtaaatttaaccaagcttttaggtacgagtcatcctgtgtgtgtagtgatcttttagatgagctacatgggactcaaagcttattctcttggctgcatttaacagtaccactgactactataatgtgtacatataggcatgcgcctccagacactggcaataattataacgttgatgatatagcagaacagagtggcctctataggtatcatatgggtggtatagaaggatggtgccagaagttgtggactacagaagccatagcattattggacacagtagcagtcaagggcagatttcaactaacatcccttataaatggagataatcagtctatagatataagtaaacctacaagattgggaacaagaactcagtcagaggctgactatgatttagccataaactctttgaggcttatatcagctgcttacaaagggataggtcataagctgaaggaaggagaaacttacctatcacgtgacatgcagtttatgagtaaaaccattcaacatgagggggtatattatccagcttccatcaaaaagatcctgagagttggtccatggattaacaccatactagacgatatcaaaactagcacagagagtataggtagtttaacacaggaattagagtataagggggaaagtctaatgtccagtttgttattgaggaacttctggctatacaggttatactcagttgacttgaaagaccattctttatgtgggaagcaattatataggtcattaattaaagtacttaagcatcttaagagatgttttaacctggaaaatttaggagaatgtttagaactgtttcttaatgtcccgatgcagtttggaggtgctgaccccaatgtcatctataggtcattctatagaaggacaccagatttcttgactgagtccataactcatctaatactgatattaaaacacttcagacgtgatctcgagtttaacaaagacaatgtctcaaaagcagtgttgtctttactagaatttaccaagaatgattctgctgagtttgtaaccttaatgagagaccctcaagcaataggttcagagaggcaagctaaaataactagtgacattaacagaactgctgtaaccagtgtgctctctaatgctcctaatgagatatttagaactagtgccttacattattcctccactgagaatgaactgaacggcatagcaagtggtgttagccctgtatatcctcatggtttaagggtcttatatgaatcactaccattctataaagctgagaaaatagtcaatatggtgtctggaacaaaatcaatcactaacatacttgagaaaacctcagctataagttatacagatattataagagctactaacatgatggtcgagaatttaacattgctgacaagaataatgaaaccaggtgcagacacttctctagatccagacaccatagtgattaccatactaagtaagatcattagagataaatcttgggatgtaggagatattataggtgtaacctcaccttcacctgtcagctgctttaaggtagtttacacctcaaccctccaaaataatagtgttgttattgagagatataccactgacacatatacaagaggcaagagagggcctacaaaaccctgggtgggctctagcacccaagaaaagaaatcaatgcctgtatacaacagacaggtgctcacaagaggccagagagaccaaatagagaacatagcaaaactagaatgggttttcagctctgttgcaaacatagactcattattgaatgagctaagcactatgaccttgggcttaagtctgagaaaatgtaggcaattatttcccacttatttgagtttaaactttctccatagactatcagtgagcagcagacctcgggagtacccctcatctttacctgcttacaggactactaacttccactttgacacaggtcctataaataaagttttaactgagaggtttggagacgaggatattaaccttgtgtttcagaatgcaattagctatgggctaagcactatgagtttggtagaacagtttactggagtgtgtcctaataaggttttgcttgtgccaaagcttcaggaaatacaactcatgaaagtcccaatatttcaagggggatttaatctacagtctattatacctataattaggcagcaacacatgttccttcctaaccatataacaccagctcaatatatagaattgtttctgagtagtaaacagttccactcacgaattaacttaaaacacaataataggtttaaattggttttgcaaaaagattactttaacggggaaaacatgattgagaccttaagcacatgtcttgctggtcattggatcataattcttatgttgatgaaagaatcacaaggtatctttgacaaagaatggtacgatgggtttgtcacagaccacatgttcctggacttacaactcttcctctctagctttaaaacatttctcacagtttttaactttgcatatcttaaggtaggatcaaacatagaggagataacaggtaatcaggcaaatttactagaactattagaccttggttactggaaaaacatgtataaagttttcagtgagacaaaagtgagactagctttattaaagcaagatttgagtttcaactcagtgaaaaattcctccagctttagacattggtttataaactcactacaggaagttcagtgtactagtgtcccttgggttgttaatgtaactagaaaccccacacaccttaaaggtgtgttgcaatatatgaaaatgatagagtcaggcatgattcagggttactcagctaacatcagttcagtcctatcaatcccatacaactatcctgacatggcgcacatgatgacaaagattattagaaatagaggtcatatgtcttatgattatcccaagatgaagaagagtttaacgttctcgatgacggacatgtcagattcttacatgctaaatctcttccctaaagttgagtgctcatatatgagtggttatttagataaattagatgatacattgcaactgctcaaaaaaccacccgtgggtaggaaagtaccttctgtagcactaccctggcatcactgcaaccgatacaattttgtgttcagttccacaggttgtaaggtatctgtaatagatatgttacctaagcatttccggagaagtaatttaaaggttatatgtttcataggtgaaggtgctggaaaccttatgttaagagcagtcttagaagtaggtgggaatattaaacttatttacaggagcctaaaagaccctgatgaccatcatgttcctgtggagtttcttagattaaaaccttgttatccttacatagatacaggtggatcactgagtctggcatcaactgatgctactaataaagcacattgggattacctgcatttacattggacagatcctttaaatttaatagtatgtgatgctgaaattagtggtgttaagcactggttgaaaatattgcatagatggtatgagcacatgaccagctgtaagcactgccttaagtcagagcatgataaatatttgattatcaaatatcatgcacaggatgaccttatagacttacctcatggtgtgcgcctattgaagtgcaatatctgtcttggtagtaaactgtcaggctcagagtcttacctgcttataggattggggttatccaataaattacctgtgtacagcgaggtattgcactctaaactacttctagcagaatgtcaccaattccatcatcctaaatatctggatgtatcaggtattaacactaacattaagtctcttatacctatgctggattaccccatcacttataataagattacaacattattagaatctgttagagaattgtcttcaaataaaaataaaaatacaatgtggattggacgaaaccctgtttaccataacaaatggctaaagagaaagtattttaacatacttaaatggttaaagtattgtattgaattaccagcttttagaatggattataattcatttgagaggatagaaatgctttaccccaacttaagggatttagtggattctgtgtcaacaagtgaactgaaaaaagttataaaagtcacagggattcttttccgatctaacacaatgtaaattaatatgccaatgctaacatgtcatccccactactttttttgttcaatcactctcagtctagacatgtgagaagatcccaaacccaactgcacccctcccactcgaaatcagttgtagcctcagcagctccatctgccatgatctctgaccagcagcaaatgtattattattttaatttgtctatagttaacaaaaaattgatatctcacaggttgtaaacatagttcttttataattattgttagttaaactattgtgtttgacttcctttgggtatttttttcccgt

SEQ ID NO: 2 - DNA, 17882 bp, synthetic construct
  source 1..17882: mol_type = other DNA
acgcgaaaaaatgcataacaaaactatcaacctgaaaaaagttaggacaagtgaagattgctagtcccaaagaccagaatcatgggctgtaatgtgatgatggagcttgattatggtggacgagctgcatggctggcattccacataaccaactttgataggtcagatttggaaactatcctaagaggtgctagggtgtgcaatacatggcaagatcagagactctccgtgtaccttgtgggaagggattgcaatttgttaagaccatttgtgcaagctgccaaatttatccataatactaggagaggccaaacattaacacattggttcacaaaaaatatcgtgtttagttctacagggcaagagacagagcctcccattgaccccacatgtgagctgttggtagagctgatcagtggttaagatgacagcacattatgtagttaattaaaacaaagggtaggacaagtcctaatgtccacagctatgaacaagttcactcagaccatctctaaacctgccactatcttgaatatttcagacagtgaagagtcgggcgatgaggcaggggtgggcaaggtgtcccgtaccacacagagctcagagaggtggcttgatttgctcattgaaaagttccagccgagcctacaaaacatcactagatacatcaactggaacttcatcaggatctgcaatgataggcttaaaaaagaaaaaatggggtacattgaggccaagcaatatgtggaagacatggcttggatggtgatagcatctgaggcagacagcattgagtggaagtgcataaggaggcaggagaaagtgactggggtgaaatacccaaagttcttctttgtacaacacaaagaggactggattgagtgcacaggatgcattccgtacccaggccatgacttgatctatgatgaggatgatgatgactgagctgactcagatcactccaaccagcagagagatccaccacctatagcaagtgatgtagtatttagtctatgattagttatagaaaaacattaggataaatacacatcctaggccgggccaaaatgtctctagacagattgaagctcaatgatgtctcaaacaaggatagcctgctgtccaactgcaaatacagtgttaccagatccacaggcgatgtaaccagtgtgtctggtcatgctatgcagaaagcccttgcaaggacactcggcatgttcttacttactgccttcaaccgttgcgaagaagtggcagaaatagggctccaatatgccatgtccttgctaggcagagatgatagcatcaagatattaagagaagccggctacaatgtaaaatgtgtggacacacagctcaaggactttacaatcaaattacaaggaaaggaatacaaaatacaagtcctagatatagtgggaatagatgcagccaatttagctgatctagagatacaagccagaggagtggtagcaaaagaactcaaaacaggagccaggctacctgacaatcggaggcatgatgcaccagattgtggtgtgatagttctctgtattgcagcattagttgtttccaaattagctgcaggggacaggggaggacttgatgctgtggaaagaagggctttaaatgtgctgaaagccgagaaagccaggtaccccaacatggaggtcaagcagatagctgaaagtttttatgatctgtttgaaaggaagccttattacattgatgtcttcatcacttttggcctggcccagtctagtgtcaagggaggcagcaaagttgaggggctgttttcaggtctcttcatgaatgcatacggggcaggacaagttatgctgaggtggggtttactggcaaaatctgtcaagaacatcatgctaggccatgctagtgtacaagctgagatggaacaggtggttgaggtttacgaatatgctcagaagcaaggaggggaggcaggattctatcacatcagaaataatccaaaagcttcacttctctctttgaccaattgtcctaatttcaccagtgttgtgcttggcaatgctgcaggtttaggcatcatagggtcatataagggtgctcctaggaatagagaactctttgatgctgccaaagattatgcagaaagattaaaggacaacaatgtaattaactacagtgcattaaacttgactgcagaagaaagagagctgatcagccagcagctgaacattgttgatgacactcctgatgatgatatttaattaaaactggaaaatgtaggataaatatggagaaattcgcccccgaatttgttggcgaggatgctaacaagaaggcagaggagtttctcaaacatagatccttcccttcggaaaaaccactagctggtataccgaacactgccactcatgtcaccaaatataacatgccccctatattgcgtagctcattcaaactcccttccccgagagttgctgcaaatcttactgaaccctctgctccccctaccactccaccacccacacctccccagaacaaggaagagcagcccaaagagtctgatgttgacattgagactatgcatgtctgtaaggttcctgacaatccggaacacagcaagaagccatgctgctcagatgataccgatactaagaaaactaggaagccgatggtcacctttgtggaacccgaggagaaatttgtcggattgggagctagcttgtacagggagaccatgcagacctttgctgctgatggttatgatgaagaaagcaacctatcgtttgaggagactaaccaagagccgggttcttcatctgtagaacaaagactagatagaatagaggagaaattgtcctacataataggccttttaaacaccataatggtagcgactgctggacctaccactgctagagatgagattagagatgcccttataggcactagagaagaacttattgagatgatcaagtctgacatcttgactgtcaatgacagaatagtggccatggagaagctcagagatgaggaatgctccagagctgacactgatgatggatcagcctgttatttaacagacagagcaaggatactagataagatagtgtccagcaatgctgaagaggctaaggaagatttggatgttgatgacatcatgggcattaatttttagttaattaaaataacaacaggacaaataatggaggcctacttggtagagatgtaccatggtgtcccatatacagctgcagtacagctaaacttggttgaaaaacattcagccaacatatcactaactgtgtggataccgatgtttcaaacatctctaccaaagaactccgttatggacctgctacatgatgttacagtcatttgtacacagatatcaacagtgcatggtcccatgatcaaggtagatctgagctcttccaatgcaggtttagctaccatgccaaggcaattcttgataaatgctatcatagctttggatgactggggcaacatggattacgaagtgcctgttgcttttgataaaaagagcttctgtgtgacaattcttaagcctaaaaacatgctttacactgtacccagcattactcccactaatcgacctactcatgagctgatagctgtctgctctttccataacagggtaacattaaagtcattcaatatacctgtcttcatcagagcactgtctatcagacagcaggaccttgatagtgtggagcaggctataagctccgatgtggaccatgctataacaacagctagggtggctccctatgcagggcttacacttgtgatcaacatcacatccaccaaaggagcattcaaactgctaaaggcaggtagtcagattcttgcagaactgggtccctatctgacgcaggtgagcctacatgatgtgattatgaactggaaacatacaggcacttcctacatactcaagagctcctcaacaagtggatgaaaaagagaaagtcaccattgatcagctcaatccacaactacaaccccacgatttcacacagcacaacaaccaccgccaccaacatccacatgacaaccacacatacacacccacatacatatatacacatatcttagttaaataaaatcaggataaataatggatcctaacatgacctcacaccagatcaccctcgagatcaacatgaccagcagccgtattggcacatacactacaccagccccaacagctcttctccttgcatgtgccgtcatcaacacagtgtgtgcgctgataatggcctgcagcagtagaagcactgccacatcaggcattgtcagcagccaatgcacagttcatcccaatcaccctccaccaagttatggcgtcaatgtaactggtctgccgggtaacctatactcaaggaacactacataacattataaataacagaaattatccttcaataaaccccaggccagacagctttaccctgctagacgattcaatcagcccttgcagtatgtcgtctagttaacaaaaaaccggtaggataagtactatcctattggaaccaaacgagacctgtagagcagctcacacaagagaaccacaagctgacttcacctagtatgggaaggaacttagaagtgagtggcagcattaccaatttgaactttgagagaactcagcatcctgacacatttaggactgttgtaaaagtgaaccaaatgtgtaagcttattgcaggtgtgctcacaagtgctgctgtggcagtttgtgtgggggtcataatgtattctgttttcacatcaaaccacaaggccaactccacgcagaatgccacgacccggaacagcacatccacccctccccaaccaaccgccggtctgcccaccacagagcaagggaccatccccagattcaccaaaccccccaccaaaaccgccacccaccatgagatcacagagcccgtcaaaatggcaacaccttcagaggatccctaccaatgctccagcaatggttatttggaccgacctgatttacctgaaaatttcaaactcgtattggatgttatatgcaagcctccaggtcctgaacatcacaacaccagctgttatgagaaacgtgaaatcaacccaggaagtgtttgccctgatcttgtaacaatgaaggcaaacatgggcttaaacaatggtggtggggaggatgctgcaccttatatagaggttaccaccctttctacgtactccaacaaaagggcaatgtgtgtccacaatgggtgtgatcaaggcttctgtttcttcctttctggtttaagcactgatcaggagagagctgtgctagagcttggaggtcaacaggctatcatggagttgcattatgattcctactggaaacactattggagtaactctaattgtgttgttcccagaacaaactgcaacctgacagaccaaactgagattttgtttcctaggtttaacaacaagaatcagtctcagtgtaccacctgtgcagattcagctggcctagataacaaattttatctcacatgtgatgggcttttaagaaccctccctctagttggactacccagcctaagtcctcaggcttacaaagctgtacccacacaaactacaggcaccaccacggcaccaacatcagagacgaggcacccaacccctgcacccaggaggtccaaacctctcagtcggaagaagagagctttatgtggtgtagactcaagcagagaacccaaaccaacaatgccttactggtgtcctatgctccaattatttccaaggaggtctaattcttaagtgacctattcctgaattaacttcagaataagtaccaaccttatcagtagttaatgaaaactaagctttgatataataggacaaatatgattcctggcaggatctttctagtccttctggtgatcttcaacaccaagccaattcacccaaatacattaacagaaaaattctatgagtccacatgtagtgttgagactgcaggttataagagtgcccttagaacaggttggcatatgacagttatgtcaattaagttgtctcaaataaatattgagtcatgcaagagcagcaactcgttattggctcatgagcttgcaatctatagtagtgcagtggatgaattgagaacgttatcatccaatgccttgaagtccaaaaggaagaagaggttcctcggtttgattcttggtctcggagctgcagtcactgccggggtggctttagccaagacagtgcaacttgaaagtgagattgcattgattagagatgcagtgagaaatacaaatgaggctgttgttagcctaaccaacggcatgtcagtgttggctaaagtggtggatgatttgaaaaacttcatatctaaagaattactcccaaaaataaaccgagtctcttgtgatgtgcacgacatcactgccgtcattagattccaacagctcaacaaaagacttttggaagtatctcgtgaattttcatctaatgcaggattaacacacactgtttcatcttttatgttaacagaccgggaactcacctccattgtaggcggcatggctgtttcagcaggccaaaaagagataatgctatctagcaaagctataatgagaagaaatgggttagcaatattaagttcagtcaacgctgacacactggtttatgtaatacaactcccattatttggtgttatggacacagattgttgggtaataagaagttctatagactgtcataacatagcagacaagtatgcttgtttggctagagctgataatggctggtattgtcacaatgctggctcattatcatacttcccgtcgccaacggattgtgagatccacaatgggtatgctttctgtgacactctaaaaagtctaactgtacctgtaacatcacgagaatgcaactcaaacatgtataccactaactacgattgtaagatttccacaagtaaaacttatgtgagtacagcggtactgactacaatgggttgcttggtatcttgttatggtcataacagttgcacagtcatcaataatgacaaaggtataataaggactctgccagatggttgccactacatctccaacaaaggtgtggacagggttcaagtaggtaacactgtttactatcttagcaaagaagttggcaagtcaattgttgtcagaggggaaccattggtcttgaaatatgaccctttgagtttccctgacgataaatttgatgttgctataagagatgtggagcatagcatcaatcagacacgcacattcttgaaggcctctgatcagttattggacttaagtgaaaacagagagaataaaaatttaaacaagtcatatatactaacaactctgctcttcgttgtaatgcttattataataatggctgtcatagggttcattctgtataaggtattgaaaatgatcagagacaacaagttgaaatccaaaagtacacctggcctcacagttttatcatgacaattgtaccaaaccataattgagttagttaattaaaaacttaggataagtgacaatccagacccaacacctctttcaactctcaaggataaggtaggatgagtgtgagaccttgcaaatttgaggttcaagggttttgttccagagggaggaattgcaagtatagtcataaatattgggaatggcctttgaaaactcttatgctcaggcagaactacatgcttaataggatttataggttcctcgacaccaacacagatgcaatgtcagatgtcagcggatttgatgcaccacaaaggactgctgagtatgccttgggaaccataggtgtgctgaaaagttacctggaaaaaactaacaacatcactaaatcaatagcttgtggcagtttgatcactgtattgcagaacttggatgttggtctagtaatacaagcaagagatagcaacactgaggacaccaattacttgagaagttgcaacactatactgtcttatatagacaagatacacaagaagagacaaattattcacattctcaaaagactgccagtaggagtactatgcaatctgatccaatctgtcatctccatcgaggagaagataaattcttctatgaaaacagaatgataaggctgcctaaatactatccagccatactgcataagatgtatattattagagtaaatagaaacctcacttacgatgggtctggaccatccacaataatagatgcaggaaagtctgtggtgtggaatcgtgttgatgtgatagcttgtgtgaaagaggccttgtgctgcatagaattcagctggaataaccaagtgatcatagactttgattatagccaggccagatgatgtggactgtattcctttttttgtcagtaatcagttattaacccaaaattgttaattatgtagactttaagttaactaacttcatgttaattcaatagttatataaaaaaatattcgaattaggatcaatatggatcctattgatgaacaagaagttaatgtgtacttgccggatagctacttaaagggtgttatatcttttagtgaaactaatgctcttggcagctgtatcattggtagacctttcttgaaggatgactttactgccactacttcaatccgtaaccccctaattgaacataaaagaataagggacactaaattagtaaaaaatattgtttcaaaccctcaatataggttagtggagcctctccaaatgcagcatgagctcttgagtgtactatcgcccaatttcatattgcacactgccaacttaaggaaaattatacaaagaagtgttgacataacagataaaaagttgaaccccattttgcacattttgaatcttaattctcctaaccaagagggtaaggtgtcggaacggctaactaggctaattaagaaacatctctctcacatacctaattgggtaagcagctggtacaatatatgggtcaatcttaacaacttactgcaggagtaccgttcaaaggaagttatagaccataactgtgttctgactaggcaattgtctggaagtttcatacatgtggtcatgagtcaatatggagttgtgataattagcaaaaaaagtaaaagatatacaatgtgtacttataaccaattcctaacctggaaggaccttgccttgagcagatttaatgccaattatgtggtctggctaagtaatgtgttaaacacactcaacgaggggttgggattaaggtgtagattaaaaggtcatctgctcagtaagttgtacatttccactgacatctttttatcttcaacatctaatgaattttataatgtggtcaaggaatttgagggcttcatcatgtcactgatattgaaacaaactgaggaagccttatttagcacaaggttttataataacatgttgaacaacttaattgatgccattgatagggctcgactagagtatctggcccgctgtgccaattcagctgccaggattaatttacctagtacagatgttatgatagcatcattgggtgatatcttatctttgataaacgttttaggtgaatccaaccttaacaacttaagtgagttatattttatcttcaggatatttggtcaccctatggttgatgagaggaaggccatggatgcagtcagagataactgttgtgaaacaaagtttctgacggctaagaaccttgcatcgttaagaggagcatatgtttatagaattatcaaaggattcgtagcaaattataacaggtggccttacataaaaactagagtttgccttacaccaacatggattaactatcttgacaccaattcatgtccctcattattagagatgacagaagatgattttattgtgttagctggagtgcactttataagagaattccacatcccaaagctaactgatctggagattatattaaatgacaaggccatatctcctccaaaatcactcatttggtcatgctttccaaaaaactacatacctcaggttatacaagatgagtatgcccggaggtattgtagagctaaagcacctttgaagacaagacgtgtcttggagttctacttacaggacaaggatttcaagttggatcagctccatagagtagtagtgaaccaggactaccttaatgataaagaacatataatttctttaacaggaaaagaaagagagttgggtgttggtaggatgtttgccatgcaacctgggaagcagaggcaagtccaaattttagcagagaagctgttggctgataacatcctgcaattctttccggagacactgactagatacggtgatttggagctgcaaaagatactagagttaaaagctggactttcaaataaaaatgacagatctaaagactcctacaataattatataagtaggtgctcattaattactgatttaagtaaatttaaccaagcttttaggtacgagtcatcctgtgtgtgtagtgatcttttagatgagctacatgggactcaaagcttattctcttggctgcatttaacagtaccactgactactataatgtgtacatataggcatgcgcctccagacactggcaataattataacgttgatgatatagcagaacagagtggcctctataggtatcatatgggtggtatagaaggatggtgccagaagttgtggactacagaagccatagcattattggacacagtagcagtcaagggcagatttcaactaacatcccttataaatggagataatcagtctatagatataagtaaacctacaagattgggaacaagaactcagtcagaggctgactatgatttagccataaactctttgaggcttatatcagctgcttacaaagggataggtcataagctgaaggaaggagaaacttacctatcacgtgacatgcagtttatgagtaaaaccattcaacatgagggggtatattatccagcttccatcaaaaagatcctgagagttggtccatggattaacaccatactagacgatatcaaaactagcacagagagtataggtagtttaacacaggaattagagtataagggggaaagtctaatgtccagtttgttattgaggaacttctggctatacaggttatactcagttgacttgaaagaccattctttatgtgggaagcaattatataggtcattaattaaagtacttaagcatcttaagagatgttttaacctggaaaatttaggagaatgtttagaactgtttcttaatgtcccgatgcagtttggaggtgctgaccccaatgtcatctataggtcattctatagaaggacaccagatttcttgactgagtccataactcatctaatactgatattaaaacacttcagacgtgatctcgagtttaacaaagacaatgtctcaaaagcagtgttgtctttactagaatttaccaagaatgattctgctgagtttgtaaccttaatgagagaccctcaagcaataggttcagagaggcaagctaaaataactagtgacattaacagaactgctgtaaccagtgtgctctctaatgctcctaatgagatatttagaactagtgccttacattattcctccactgagaatgaactgaacggcatagcaagtggtgttagccctgtatatcctcatggtttaagggtcttatatgaatcactaccattctataaagctgagaaaatagtcaatatggtgtctggaacaaaatcaatcactaacatacttgagaaaacctcagctataagttatacagatattataagagctactaacatgatggtcgagaatttaacattgctgacaagaataatgaaaccaggtgcagacacttctctagatccagacaccatagtgattaccatactaagtaagatcattagagataaatcttgggatgtaggagatattataggtgtaacctcaccttcacctgtcagctgctttaaggtagtttacacctcaaccctccaaaataatagtgttgttattgagagatataccactgacacatatacaagaggcaagagagggcctacaaaaccctgggtgggctctagcacccaagaaaagaaatcaatgcctgtatacaacagacaggtgctcacaagaggccagagagaccaaatagagaacatagcaaaactagaatgggttttcagctctgttgcaaacatagactcattattgaatgagctaagcactatgaccttgggcttaagtctgagaaaatgtaggcaattatttcccacttatttgagtttaaactttctccatagactatcagtgagcagcagacctcgggagtacccctcatctttacctgcttacaggactactaacttccactttgacacaggtcctataaataaagttttaactgagaggtttggagacgaggatattaaccttgtgtttcagaatgcaattagctatgggctaagcactatgagtttggtagaacagtttactggagtgtgtcctaataaggttttgcttgtgccaaagcttcaggaaatacaactcatgaaagtcccaatatttcaagggggatttaatctacagtctattatacctataattaggcagcaacacatgttccttcctaaccatataacaccagctcaatatatagaattgtttctgagtagtaaacagttccactcacgaattaacttaaaacacaataataggtttaaattggttttgcaaaaagattactttaacggggaaaacatgattgagaccttaagcacatgtcttgctggtcattggatcataattcttatgttgatgaaagaatcacaaggtatctttgacaaagaatggtacgatgggtttgtcacagaccacatgttcctggacttacaactcttcctctctagctttaaaacatttctcacagtttttaactttgcatatcttaaggtaggatcaaacatagaggagataacaggtaatcaggcaaatttactagaactattagaccttggttactggaaaaacatgtataaagttttcagtgagacaaaagtgagactagctttattaaagcaagatttgagtttcaactcagtgaaaaattcctccagctttagacattggtttataaactcactacaggaagttcagtgtactagtgtcccttgggttgttaatgtaactagaaaccccacacaccttaaaggtgtgttgcaatatatgaaaatgatagagtcaggcatgattcagggttactcagctaacatcagttcagtcctatcaatcccatacaactatcctgacatggcgcacatgatgacaaagattattagaaatagaggtcatatgtcttatgattatcccaagatgaagaagagtttaacgttctcgatgacggacatgtcagattcttacatgctaaatctcttccctaaagttgagtgctcatatatgagtggttatttagataaattagatgatacattgcaactgctcaaaaaaccacccgtgggtaggaaagtaccttctgtagcactaccctggcatcactgcaaccgatacaattttgtgttcagttccacaggttgtaaggtatctgtaatagatatgttacctaagcatttccggagaagtaatttaaaggttatatgtttcataggtgaaggtgctggaaaccttatgttaagagcagtcttagaagtaggtgggaatattaaacttatttacaggagcctaaaagaccctgatgaccatcatgttcctgtggagtttcttagattaaaaccttgttatccttacatagatacaggtggatcactgagtctggcatcaactgatgctactaataaagcacattgggattacctgcatttacattggacagatcctttaaatttaatagtatgtgatgctgaaattagtggtgttaagcactggttgaaaatattgcatagatggtatgagcacatgaccagctgtaagcactgccttaagtcagagcatgataaatatttgattatcaaatatcatgcacaggatgaccttatagacttacctcatggtgtgcgcctattgaagtgcaatatctgtcttggtagtaaactgtcaggctcagagtcttacctgcttataggattggggttatccaataaattacctgtgtacagcgaggtattgcactctaaactacttctagcagaatgtcaccaattccatcatcctaaatatctggatgtatcaggtattaacactaacattaagtctcttatacctatgctggattaccccatcacttataataagattacaacattattagaatctgttagagaattgtcttcaaataaaaataaaaatacaatgtggattggacgaaaccctgtttaccataacaaatggctaaagagaaagtattttaacatacttaaatggttaaagtattgtattgaattaccagcttttagaatggattataattcatttgagaggatagaaatgctttaccccaacttaagggatttagtggattctgtgtcaacaagtgaactgaaaaaagttataaaagtcacagggattcttttccgatctaacacaatgtaaattaatatgccaatgctaacatgtcatccccactactttttttgttcaatcactctcagtctagacatgtgagaagatcccaaacccaactgcacccctcccactcgaaatcagttgtagcctcagcagctccatctgccatgatctctgaccagcagcaaatgtattattattttaatttgtctatagttaacaaaaaattgatatctcacaggttgtaaacatagttcttttataattattgttagttaaactattgtgtttgacttcctttgggtatttttttcccgtgggtcggcatggcatctccacctcctcgcggtccgacctgggcatccgaaggaggacgcacgtccactcggatggctaagggagagcctgcagtagcataaccccttggggcctctaaacgggtcttgaggggttttttgctgaaaggaggaactatatacgcgtcgacgggcccgcgctcactggccgtcgttttacaacgtcgtgactgggaaaaccctggcgttacccaacttaatcgccttgcagcacatccccctttcgccagctggcgtaatagcgaagaggcccgcaccgatcgcccttcccaacagttgcgcagcctgaatggcgaatgggacgcgccctgtagcggcgcattaagcgcggcgggtgtggtggttacgcgcagcgtgaccgctacacttgccagcgccctagcgcccgctcctttcgctttcttcccttcctttctcgccacgttcgccggctttccccgtcaagctctaaatcgggggctccctttagggttccgatttagtgctttacggcacctcgaccccaaaaaacttgattagggtgatggttcacgtagtgggccatcgccctgatagacggtttttcgccctttgacgttggagtccacgttctttaatagtggactcttgttccaaactggaacaacactcaaccctatctcggtctattcttttgatttataagggattttgccgatttcggcctattggttaaaaaatgagctgatttaacaaaaatttaacgcgaattttaacaaaatattaacgcttacaatttaggtggcacttttcggggaaatgtgcgcggaacccctatttgtttatttttctaaatacattcaaatatgtatccgctcatgagacaataaccctgataaatgcttcaataatattgaaaaaggaagagtatgagtattcaacatttccgtgtcgcccttattcccttttttgcggcattttgccttcctgtttttgctcacccagaaacgctggtgaaagtaaaagatgctgaagatcagttgggtgcacgagtgggttacatcgaactggatctcaacagcggtaagatccttgagagttttcgccccgaagaacgttttccaatgatgagcacttttaaagttctgctatgtggcgcggtattatcccgtattgacgccgggcaagagcaactcggtcgccgcatacactattctcagaatgacttggttgagtactcaccagtcacagaaaagcatcttacggatggcatgacagtaagagaattatgcagtgctgccataaccatgagtgataacactgcggccaacttacttctgacaacgatcggaggaccgaaggagctaaccgcttttttgcacaacatgggggatcatgtaactcgccttgatcgttgggaaccggagctgaatgaagccataccaaacgacgagcgtgacaccacgatgcctgtagcaatggcaacaacgttgcgcaaactattaactggcgaactacttactctagcttcccggcaacaattaatagactggatggaggcggataaagttgcaggaccacttctgcgctcggcccttccggctggctggtttattgctgataaatctggagccggtgagcgtgggtctcgcggtatcattgcagcactggggccagatggtaagccctcccgtatcgtagttatctacacgacggggagtcaggcaactatggatgaacgaaatagacagatcgctgagataggtgcctcactgattaagcattggtaactgtcagaccaagtttactcatatatactttagattgatttaaaacttcatttttaatttaaaaggatctaggtgaagatcctttttgataatctcatgaccaaaatcccttaacgtgagttttcgttccactgagcgtcagaccccgtagaaaagatcaaaggatcttcttgagatcctttttttctgcgcgtaatctgctgcttgcaaacaaaaaaaccaccgctaccagcggtggtttgtttgccggatcaagagctaccaactctttttccgaaggtaactggcttcagcagagcgcagataccaaatactgtccttctagtgtagccgtagttaggccaccacttcaagaactctgtagcaccgcctacatacctcgctctgctaatcctgttaccagtggctgctgccagtggcgataagtcgtgtcttaccgggttggactcaagacgatagttaccggataaggcgcagcggtcgggctgaacggggggttcgtgcacacagcccagcttggagcgaacgacctacaccgaactgagatacctacagcgtgagctatgagaaagcgccacgcttcccgaagggagaaaggcggacaggtatccggtaagcggcagggtcggaacaggagagcgcacgagggagcttccagggggaaacgcctggtatctttatagtcctgtcgggtttcgccacctctgacttgagcgtcgatttttgtgatgctcgtcaggggggcggagcctatggaaaaacgccagcaacgcggcctttttacggttcctggccttttgctggccttttgctcacatgttctttcctgcgttatcccctgattctgtggataaccgtattaccgcctttgagtgagctgataccgctcgccgcagccgaacgaccgagcgcagcgagtcagtgagcgaggaagcggaagagcgcccaatacgcaaaccgcctctccccgcgcgttggccgattcattaatgcagctggcacgacaggtttcccgactggaaagcgggcagtgagcgcaacgcaattaatgtgagttagctcactcattaggcaccccaggctttacactttatgcttccggctcgtatgttgtgtggaattgtgagcggataacaatttcacacaggaaacagctatgaccatgattacgccaagcgcgcccgggtaatacgactcactataggg

SEQ ID NO: 3 - DNA, 14890 bp, synthetic construct
  source 1..14890: mol_type = other DNA
acgcgaaaaaatgcataacaaaactatcaacctgaaaaaagttaggacaagtgaagattgctagtcccaaagaccagaatcatgggctgtaatgtgatgatggagcttgattatggtggacgagctgcatggctggcattccacataaccaactttgataggtcagatttggaaactatcctaagaggtgctagggtgtgcaatacatggcaagatcagagactctccgtgtaccttgtgggaagggattgcaatttgttaagaccatttgtgcaagctgccaaatttatccataatactaggagaggccaaacattaacacattggttcacaaaaaatatcgtgtttagttctacagggcaagagacagagcctcccattgaccccacatgtgagctgttggtagagctgatcagtggttaagatgacagcacattatgtagttaattaaaacaaagggtaggacaagtcctaatgtccacagctatgaacaagttcactcagaccatctctaaacctgccactatcttgaatatttcagacagtgaagagtcgggcgatgaggcaggggtgggcaaggtgtcccgtaccacacagagctcagagaggtggcttgatttgctcattgaaaagttccagccgagcctacaaaacatcactagatacatcaactggaacttcatcaggatctgcaatgataggcttaaaaaagaaaaaatggggtacattgaggccaagcaatatgtggaagacatggcttggatggtgatagcatctgaggcagacagcattgagtggaagtgcataaggaggcaggagaaagtgactggggtgaaatacccaaagttcttctttgtacaacacaaagaggactggattgagtgcacaggatgcattccgtacccaggccatgacttgatctatgatgaggatgatgatgactgagctgactcagatcactccaaccagcagagagatccaccacctatagcaagtgatgtagtatttagtctatgattagttatagaaaaacattaggataaatacacatcctaggccgggccaaaatgtctctagacagattgaagctcaatgatgtctcaaacaaggatagcctgctgtccaactgcaaatacagtgttaccagatccacaggcgatgtaaccagtgtgtctggtcatgctatgcagaaagcccttgcaaggacactcggcatgttcttacttactgccttcaaccgttgcgaagaagtggcagaaatagggctccaatatgccatgtccttgctaggcagagatgatagcatcaagatattaagagaagccggctacaatgtaaaatgtgtggacacacagctcaaggactttacaatcaaattacaaggaaaggaatacaaaatacaagtcctagatatagtgggaatagatgcagccaatttagctgatctagagatacaagccagaggagtggtagcaaaagaactcaaaacaggagccaggctacctgacaatcggaggcatgatgcaccagattgtggtgtgatagttctctgtattgcagcattagttgtttccaaattagctgcaggggacaggggaggacttgatgctgtggaaagaagggctttaaatgtgctgaaagccgagaaagccaggtaccccaacatggaggtcaagcagatagctgaaagtttttatgatctgtttgaaaggaagccttattacattgatgtcttcatcacttttggcctggcccagtctagtgtcaagggaggcagcaaagttgaggggctgttttcaggtctcttcatgaatgcatacggggcaggacaagttatgctgaggtggggtttactggcaaaatctgtcaagaacatcatgctaggccatgctagtgtacaagctgagatggaacaggtggttgaggtttacgaatatgctcagaagcaaggaggggaggcaggattctatcacatcagaaataatccaaaagcttcacttctctctttgaccaattgtcctaatttcaccagtgttgtgcttggcaatgctgcaggtttaggcatcatagggtcatataagggtgctcctaggaatagagaactctttgatgctgccaaagattatgcagaaagattaaaggacaacaatgtaattaactacagtgcattaaacttgactgcagaagaaagagagctgatcagccagcagctgaacattgttgatgacactcctgatgatgatatttaattaaaactggaaaatgtaggataaatatggagaaattcgcccccgaatttgttggcgaggatgctaacaagaaggcagaggagtttctcaaacatagatccttcccttcggaaaaaccactagctggtataccgaacactgccactcatgtcaccaaatataacatgccccctatattgcgtagctcattcaaactcccttccccgagagttgctgcaaatcttactgaaccctctgctccccctaccactccaccacccacacctccccagaacaaggaagagcagcccaaagagtctgatgttgacattgagactatgcatgtctgtaaggttcctgacaatccggaacacagcaagaagccatgctgctcagatgataccgatactaagaaaactaggaagccgatggtcacctttgtggaacccgaggagaaatttgtcggattgggagctagcttgtacagggagaccatgcagacctttgctgctgatggttatgatgaagaaagcaacctatcgtttgaggagactaaccaagagccgggttcttcatctgtagaacaaagactagatagaatagaggagaaattgtcctacataataggccttttaaacaccataatggtagcgactgctggacctaccactgctagagatgagattagagatgcccttataggcactagagaagaacttattgagatgatcaagtctgacatcttgactgtcaatgacagaatagtggccatggagaagctcagagatgaggaatgctccagagctgacactgatgatggatcagcctgttatttaacagacagagcaaggatactagataagatagtgtccagcaatgctgaagaggctaaggaagatttggatgttgatgacatcatgggcattaatttttagttaattaaaataacaacaggacaaataatggaggcctacttggtagagatgtaccatggtgtcccatatacagctgcagtacagctaaacttggttgaaaaacattcagccaacatatcactaactgtgtggataccgatgtttcaaacatctctaccaaagaactccgttatggacctgctacatgatgttacagtcatttgtacacagatatcaacagtgcatggtcccatgatcaaggtagatctgagctcttccaatgcaggtttagctaccatgccaaggcaattcttgataaatgctatcatagctttggatgactggggcaacatggattacgaagtgcctgttgcttttgataaaaagagcttctgtgtgacaattcttaagcctaaaaacatgctttacactgtacccagcattactcccactaatcgacctactcatgagctgatagctgtctgctctttccataacagggtaacattaaagtcattcaatatacctgtcttcatcagagcactgtctatcagacagcaggaccttgatagtgtggagcaggctataagctccgatgtggaccatgctataacaacagctagggtggctccctatgcagggcttacacttgtgatcaacatcacatccaccaaaggagcattcaaactgctaaaggcaggtagtcagattcttgcagaactgggtccctatctgacgcaggtgagcctacatgatgtgattatgaactggaaacatacaggcacttcctacatactcaagagctcctcaacaagtggatgaaaaagagaaagtcaccattgatcagctcaatccacaactacaaccccacgatttcacacagcacaacaaccaccgccaccaacatccacatgacaaccacacatacacacccacatacatatatacacatatcttagttaaataaaatcaggataaataatggatcctaacatgacctcacaccagatcaccctcgagatcaacatgaccagcagccgtattggcacatacactacaccagccccaacagctcttctccttgcatgtgccgtcatcaacacagtgtgtgcgctgataatggcctgcagcagtagaagcactgccacatcaggcattgtcagcagccaatgcacagttcatcccaatcaccctccaccaagttatggcgtcaatgtaactggtctgccgggtaacctatactcaaggaacactacataacattataaataacagaaattatccttcaataaaccccaggccagacagctttaccctgctagacgattcaatcagcccttgcagtatgtcgtctagttaacaaaaaaccggtaggataagtactatcctattggaaccaaacgagacctgtagagcagctcacacaagagaaccacaagctgacttcacctagtatgggaaggaacttagaagtgagtggcagcattaccaatttgaactttgagagaactcagcatcctgacacatttaggactgttgtaaaagtgaaccaaatgtgtaagcttattgcaggtgtgctcacaagtgctgctgtggcagtttgtgtgggggtcataatgtattctgttttcacatcaaaccacaaggccaactccacgcagaatgccacgacccggaacagcacatccacccctccccaaccaaccgccggtctgcccaccacagagcaagggaccatccccagattcaccaaaccccccaccaaaaccgccacccaccatgagatcacagagcccgtcaaaatggcaacaccttcagaggatccctaccaatgctccagcaatggttatttggaccgacctgatttacctgaaaatttcaaactcgtattggatgttatatgcaagcctccaggtcctgaacatcacaacaccagctgttatgagaaacgtgaaatcaacccaggaagtgtttgccctgatcttgtaacaatgaaggcaaacatgggcttaaacaatggtggtggggaggatgctgcaccttatatagaggttaccaccctttctacgtactccaacaaaagggcaatgtgtgtccacaatgggtgtgatcaaggcttctgtttcttcctttctggtttaagcactgatcaggagagagctgtgctagagcttggaggtcaacaggctatcatggagttgcattatgattcctactggaaacactattggagtaactctaattgtgttgttcccagaacaaactgcaacctgacagaccaaactgagattttgtttcctaggtttaacaacaagaatcagtctcagtgtaccacctgtgcagattcagctggcctagataacaaattttatctcacatgtgatgggcttttaagaaccctccctctagttggactacccagcctaagtcctcaggcttacaaagctgtacccacacaaactacaggcaccaccacggcaccaacatcagagacgaggcacccaacccctgcacccaggaggtccaaacctctcagtcggaagaagagagctttatgtggtgtagactcaagcagagaacccaaaccaacaatgccttactggtgtcctatgctccaattatttccaaggaggtctaattcttaagtgacctattcctgaattaacttcagaataagtaccaaccttatcagtagttaatgaaaactaagctttgatataataggacaaatatgattcctggcaggatctttctagtccttctggtgatcttcaacaccaagccaattcacccaaatacattaacagaaaaattctatgagtccacatgtagtgttgagactgcaggttataagagtgcccttagaacaggttggcatatgacagttatgtcaattaagttgtctcaaataaatattgagtcatgcaagagcagcaactcgttattggctcatgagcttgcaatctatagtagtgcagtggatgaattgagaacgttatcatccaatgccttgaagtccaaaaggaagaagaggttcctcggtttgattcttggtctcggagctgcagtcactgccggggtggctttagccaagacagtgcaacttgaaagtgagattgcattgattagagatgcagtgagaaatacaaatgaggctgttgttagcctaaccaacggcatgtcagtgttggctaaagtggtggatgatttgaaaaacttcatatctaaagaattactcccaaaaataaaccgagtctcttgtgatgtgcacgacatcactgccgtcattagattccaacagctcaacaaaagacttttggaagtatctcgtgaattttcatctaatgcaggattaacacacactgtttcatcttttatgttaacagaccgggaactcacctccattgtaggcggcatggctgtttcagcaggccaaaaagagataatgctatctagcaaagctataatgagaagaaatgggttagcaatattaagttcagtcaacgctgacacactggtttatgtaatacaactcccattatttggtgttatggacacagattgttgggtaataagaagttctatagactgtcataacatagcagacaagtatgcttgtttggctagagctgataatggctggtattgtcacaatgctggctcattatcatacttcccgtcgccaacggattgtgagatccacaatgggtatgctttctgtgacactctaaaaagtctaactgtacctgtaacatcacgagaatgcaactcaaacatgtataccactaactacgattgtaagatttccacaagtaaaacttatgtgagtacagcggtactgactacaatgggttgcttggtatcttgttatggtcataacagttgcacagtcatcaataatgacaaaggtataataaggactctgccagatggttgccactacatctccaacaaaggtgtggacagggttcaagtaggtaacactgtttactatcttagcaaagaagttggcaagtcaattgttgtcagaggggaaccattggtcttgaaatatgaccctttgagtttccctgacgataaatttgatgttgctataagagatgtggagcatagcatcaatcagacacgcacattcttgaaggcctctgatcagttattggacttaagtgaaaacagagagaataaaaatttaaacaagtcatatatactaacaactctgctcttcgttgtaatgcttattataataatggctgtcatagggttcattctgtataaggtattgaaaatgatcagagacaacaagttgaaatccaaaagtacacctggcctcacagttttatcatgacaattgtaccaaaccataattgagttagttaattaaaaacttaggataagtgacaatccagacccaacacctctttcaactctcaaggataaggtaggatgagtgtgagaccttgcaaatttgaggttcaagggttttgttccagagggaggaattgcaagtatagtcataaatattgggaatggcctttgaaaactcttatgctcaggcagaactacatgcttaataggatttataggttcctcgacaccaacacagatgcaatgtcagatgtcagcggatttgatgcaccacaaaggactgctgagtatgccttgggaaccataggtgtgctgaaaagttacctggaaaaaactaacaacatcactaaatcaatagcttgtggcagtttgatcactgtattgcagaacttggatgttggtctagtaatacaagcaagagatagcaacactgaggacaccaattacttgagaagttgcaacactatactgtcttatatagacaagatacacaagaagagacaaattattcacattctcaaaagactgccagtaggagtactatgcaatctgatccaatctgtcatctccatcgaggagaagataaattcttctatgaaaacagaatgataaggctgcctaaatactatccagccatactgcataagatgtatattattagagtaaatagaaacctcacttacgatgggtctggaccatccacaataatagatgcaggaaagtctgtggtgtggaatcgtgttgatgtgatagcttgtgtgaaagaggccttgtgctgcatagaattcagctggaataaccaagtgatcatagactttgattatagccaggccagatgatgtggactgtattcctttttttgtcagtaatcagttattaacccaaaattgttaattatgtagactttaagttaactaacttcatgttaattcaatagttatataaaaaaatattcgaattaggatcaatatggatcctattgatgaacaagaagttaatgtgtacttgccggatagctacttaaagggtgttatatcttttagtgaaactaatgctcttggcagctgtatcattggtagacctttcttgaaggatgactttactgccactacttcaatccgtaaccccctaattgaacataaaagaataagggacactaaattagtaaaaaatattgtttcaaaccctcaatataggttagtggagcctctccaaatgcagcatgagctcttgagtgtactatcgcccaatttcatattgcacactgccaacttaaggaaaattatacaaagaagtgttgacataacagataaaaagttgaaccccattttgcacattttgaatcttaattctcctaaccaagagggtaaggtgtcggaacggctaactaggctaattaagaaacatctctctcacatacctaattgggtaagcagctggtacaatatatgggtcaatcttaacaacttactgcaggagtaccgttcaaaggaagttatagaccataactgtgttctgactaggcaattgtctggaagtttcatacatgtggtcatgagtcaatatggagttgtgataattagcaaaaaaagtaaaagatatacaatgtgtacttataaccaattcctaacctggaaggaccttgccttgagcagatttaatgccaattatgtggtctggctaagtaatgtgttaaacacactcaacgaggggttgggattaaggtgtagattaaaaggtcatctgctcagtaagttgtacatttccactgacatctttttatcttcaacatctaatgaattttataatgtggtcaaggaatttgagggcttcatcatgtcactgatattgaaacaaactgaggaagccttatttagcacaaggttttataataacatgttgaacaacttaattgatgccattgatagggctcgactagagtatctggcccgctgtgccaattcagctgccaggattaatttacctagtacagatgttatgatagcatcattgggtgatatcttatctttgataaacgttttaggtgaatccaaccttaacaacttaagtgagttatattttatcttcaggatatttggtcaccctatggttgatgagaggaaggccatggatgcagtcagagataactgttgtgaaacaaagtttctgacggctaagaaccttgcatcgttaagaggagcatatgtttatagaattatcaaaggattcgtagcaaattataacaggtggccttacataaaaactagagtttgccttacaccaacatggattaactatcttgacaccaattcatgtccctcattattagagatgacagaagatgattttattgtgttagctggagtgcactttataagagaattccacatcccaaagctaactgatctggagattatattaaatgacaaggccatatctcctccaaaatcactcatttggtcatgctttccaaaaaactacatacctcaggttatacaagatgagtatgcccggaggtattgtagagctaaagcacctttgaagacaagacgtgtcttggagttctacttacaggacaaggatttcaagttggatcagctccatagagtagtagtgaaccaggactaccttaatgataaagaacatataatttctttaacaggaaaagaaagagagttgggtgttggtaggatgtttgccatgcaacctgggaagcagaggcaagtccaaattttagcagagaagctgttggctgataacatcctgcaattctttccggagacactgactagatacggtgatttggagctgcaaaagatactagagttaaaagctggactttcaaataaaaatgacagatctaaagactcctacaataattatataagtaggtgctcattaattactgatttaagtaaatttaaccaagcttttaggtacgagtcatcctgtgtgtgtagtgatcttttagatgagctacatgggactcaaagcttattctcttggctgcatttaacagtaccactgactactataatgtgtacatataggcatgcgccgccggacactggaaacaactataatgtagatgatattgctgagcagagtggactctaccgctaccacatgggcgggattgagggctggtgccagaagctctggacaacagaggccattgctttgctagatactgtagctgtgaagggccgtttccagctaacttcattaataaatggcgacaaccaaagtattgatatttcaaaaccaacaaggctggggaccaggactcaaagtgaagcagattatgatttggcaataaattctttaagattaatatcagcagcttataaaggcattggacataaattaaaagaaggtgagacctacttgtcacgtgacatgcagttcatgagtaaaacaatacaacatgaaggggtctactacccggcctccatcaagaaaatattaagagttggtccctggatcaacacaatattagatgatataaaaacttcaacagaaagtattggttctctaactcaagaactagaatataaaggtgaaagtttaatgagcagcctgctgctgaggaacttctggctctacagattatattcagtggatttaaaagatcattctttgtgtggaaagcagctctacagatccttaataaaagtgttaaaacatttgaagaggtgcttcaacctggagaaccttggggaatgtttggaattatttttaaatgtgcccatgcagtttggaggtgctgacccaaatgtcatctacaggagcttctacagaagaactccagattttctaacagaaagtataactcatctcatcctcattttaaaacattttagaagagatttggaattcaacaaagataatgtctccaaagctgttctttctttgctagagttcaccaagaatgattctgcagaatttgtaactttgatgagagatcctcaagcaattggtagtgagaggcaggccaagatcacttcagacatcaacagaacagctgtaacttcagtgttatcaaatgctccaaatgaaatatttagaacttcagctcttcattacagcagcacagaaaatgaattaaatggaatagcaagtggagtttctcctgtttatcctcatggtcttcgagttttatatgaaagtttacctttttataaagcagagaagattgtcaacatggtttctgggaccaagtccatcaccaacatactggagaagacatcagccatctcctacacagatataattcgagccaccaacatgatggtggagaacctcactttgctaacaagaataatgaaaccaggtgctgacacatctttggatcctgacacaatagtaataacaatattatcaaaaataataagagataaatcctgggatgttggtgatataattggtgtcacttccccatctcctgtctcctgcttcaaggtggtctacacatcaactctacaaaataattcagtagtaatagaaagatacacaacagacacctacacaagaggtaagagaggccccaccaagccctgggtgggcagcagcacacaggagaagaagtccatgcctgtctacaacagacaagttttaacaagaggacaaagagatcaaatagaaaatatagcaaagctggagtgggtgttttcttcagtagcaaatattgattctttgctaaatgagctcagcaccatgactttgggtctttctctaaggaaatgtagacaactttttccaacatatttaagtttaaacttcctgcacaggctttctgtcagcagcaggcccagagaatatccttcttctcttcctgcctacaggacaacaaattttcattttgatactggaccaataaataaagtgttaacagaaagatttggagatgaagatataaatttggtatttcaaaatgcaatatcatatggtctttccaccatgtctttggtggagcagtttactggtgtctgtccaaataaagttttgctggtgcccaagctacaagaaatacaactaatgaaagttccaatatttcaaggtggcttcaacctacaaagtataattccaataataaggcagcagcacatgttcctgcccaaccacatcactccagcccagtatattgaattatttctttcttcaaaacaatttcattcaagaataaatttaaaacacaacaacagatttaaacttgttttacaaaaagattattttaatggggagaacatgatagaaactttgtccacctgtttggcaggccactggatcatcattttgatgctaatgaaggagagtcaggggatatttgacaaggagtggtatgatggttttgtaacagaccacatgttcctggacctgcagctcttcctctcctccttcaagacatttctaactgtcttcaactttgcttatttaaaagttggttcaaatatagaagaaataacaggaaatcaagccaacctgctggagctgctggacctgggctactggaagaacatgtataaagtattttcagagaccaaggtgcggctggctttgctaaaacaagatttatcatttaattctgtgaagaacagcagcagcttccggcactggtttataaattctctacaagaagtacaatgtacttctgtgccttgggtggtaaatgtaacaagaaatccaactcatttaaaaggtgttctacagtacatgaagatgatagaaagtggcatgattcaaggttattcagcaaatatttcttcagttttaagtatcccatataattatccagacatggcgcacatgatgacaaaaataataagaaatcgaggccacatgtcctatgattatccaaagatgaagaaaagtttaactttctccatgacagacatgagtgacagctacatgctcaacctcttccccaaagtagaatgttcttacatgagtggttatttggataaactagatgatactctacaacttctaaagaaacctcctgttggaagaaaagttccttctgtggctttgccctggcaccactgcaacagatacaactttgtcttcagcagcacaggctgcaaagtttctgtcattgacatgcttccaaaacatttccgaagaagtaatttaaaagtaatatgttttattggagaaggggcgggcaacctcatgctaagagctgttttggaagttggtggaaatataaaattaatatatagatccttaaaagatcctgatgatcatcatgttcctgtagaatttctaagattaaaaccttgttatccttatattgatactggtggcagtttatctttggcttcaacagatgccaccaacaaggcccactgggattatttacatcttcactggacagatcctttaaatttaatagtatgtgatgcagaaataagtggtgtgaagcactggctaaaaattcttcacaggtggtatgagcacatgacttcctgcaagcactgtttaaaatcagaacatgataaatatttaataataaaatatcatgctcaagatgatttaatagatcttcctcatggtgtcaggctactaaaatgtaacatctgcctgggctccaaactaagtggcagtgagagctacctgctcattggtcttggtctttcaaataaacttcctgtctacagtgaagttcttcattcaaaacttcttttggcagaatgtcatcagtttcatcatccaaaatatttggatgtttctggaataaatacaaatataaaatccttaataccaatgttggattatccaataacttacaacaagatcaccactttgctagaaagtgtgcgggagctttcttcaaataaaaacaagaacaccatgtggattggaagaaatcctgtctaccataataaatggctaaagaggaaatatttcaacattttaaaatggctaaaatactgtatagaacttcctgccttcaggatggattataattcatttgagagaatagaaatgctttatccaaatttaagagatttggtagattctgtttctacttcagagctgaagaaagtaataaaagtaacaggcatcctcttcaggagcaacaccatgtgaattaatatgccaatgctaacatgtcatccccactactttttttgttcaatcactctcagtctagacatgtgagaagatcccaaacccaactgcacccctcccactcgaaatcagttgtagcctcagcagctccatctgccatgatctctgaccagcagcaaatgtattattattttaatttgtctatagttaacaaaaaattgatatctcacaggttgtaaacatagttcttttataattattgttagttaaactattgtgtttgacttcctttgggtatttttttcccgt

SEQ ID NO: 4 - DNA, 17882 bp, synthetic construct
  source 1..17882: mol_type = other DNA
acgcgaaaaaatgcataacaaaactatcaacctgaaaaaagttaggacaagtgaagattgctagtcccaaagaccagaatcatgggctgtaatgtgatgatggagcttgattatggtggacgagctgcatggctggcattccacataaccaactttgataggtcagatttggaaactatcctaagaggtgctagggtgtgcaatacatggcaagatcagagactctccgtgtaccttgtgggaagggattgcaatttgttaagaccatttgtgcaagctgccaaatttatccataatactaggagaggccaaacattaacacattggttcacaaaaaatatcgtgtttagttctacagggcaagagacagagcctcccattgaccccacatgtgagctgttggtagagctgatcagtggttaagatgacagcacattatgtagttaattaaaacaaagggtaggacaagtcctaatgtccacagctatgaacaagttcactcagaccatctctaaacctgccactatcttgaatatttcagacagtgaagagtcgggcgatgaggcaggggtgggcaaggtgtcccgtaccacacagagctcagagaggtggcttgatttgctcattgaaaagttccagccgagcctacaaaacatcactagatacatcaactggaacttcatcaggatctgcaatgataggcttaaaaaagaaaaaatggggtacattgaggccaagcaatatgtggaagacatggcttggatggtgatagcatctgaggcagacagcattgagtggaagtgcataaggaggcaggagaaagtgactggggtgaaatacccaaagttcttctttgtacaacacaaagaggactggattgagtgcacaggatgcattccgtacccaggccatgacttgatctatgatgaggatgatgatgactgagctgactcagatcactccaaccagcagagagatccaccacctatagcaagtgatgtagtatttagtctatgattagttatagaaaaacattaggataaatacacatcctaggccgggccaaaatgtctctagacagattgaagctcaatgatgtctcaaacaaggatagcctgctgtccaactgcaaatacagtgttaccagatccacaggcgatgtaaccagtgtgtctggtcatgctatgcagaaagcccttgcaaggacactcggcatgttcttacttactgccttcaaccgttgcgaagaagtggcagaaatagggctccaatatgccatgtccttgctaggcagagatgatagcatcaagatattaagagaagccggctacaatgtaaaatgtgtggacacacagctcaaggactttacaatcaaattacaaggaaaggaatacaaaatacaagtcctagatatagtgggaatagatgcagccaatttagctgatctagagatacaagccagaggagtggtagcaaaagaactcaaaacaggagccaggctacctgacaatcggaggcatgatgcaccagattgtggtgtgatagttctctgtattgcagcattagttgtttccaaattagctgcaggggacaggggaggacttgatgctgtggaaagaagggctttaaatgtgctgaaagccgagaaagccaggtaccccaacatggaggtcaagcagatagctgaaagtttttatgatctgtttgaaaggaagccttattacattgatgtcttcatcacttttggcctggcccagtctagtgtcaagggaggcagcaaagttgaggggctgttttcaggtctcttcatgaatgcatacggggcaggacaagttatgctgaggtggggtttactggcaaaatctgtcaagaacatcatgctaggccatgctagtgtacaagctgagatggaacaggtggttgaggtttacgaatatgctcagaagcaaggaggggaggcaggattctatcacatcagaaataatccaaaagcttcacttctctctttgaccaattgtcctaatttcaccagtgttgtgcttggcaatgctgcaggtttaggcatcatagggtcatataagggtgctcctaggaatagagaactctttgatgctgccaaagattatgcagaaagattaaaggacaacaatgtaattaactacagtgcattaaacttgactgcagaagaaagagagctgatcagccagcagctgaacattgttgatgacactcctgatgatgatatttaattaaaactggaaaatgtaggataaatatggagaaattcgcccccgaatttgttggcgaggatgctaacaagaaggcagaggagtttctcaaacatagatccttcccttcggaaaaaccactagctggtataccgaacactgccactcatgtcaccaaatataacatgccccctatattgcgtagctcattcaaactcccttccccgagagttgctgcaaatcttactgaaccctctgctccccctaccactccaccacccacacctccccagaacaaggaagagcagcccaaagagtctgatgttgacattgagactatgcatgtctgtaaggttcctgacaatccggaacacagcaagaagccatgctgctcagatgataccgatactaagaaaactaggaagccgatggtcacctttgtggaacccgaggagaaatttgtcggattgggagctagcttgtacagggagaccatgcagacctttgctgctgatggttatgatgaagaaagcaacctatcgtttgaggagactaaccaagagccgggttcttcatctgtagaacaaagactagatagaatagaggagaaattgtcctacataataggccttttaaacaccataatggtagcgactgctggacctaccactgctagagatgagattagagatgcccttataggcactagagaagaacttattgagatgatcaagtctgacatcttgactgtcaatgacagaatagtggccatggagaagctcagagatgaggaatgctccagagctgacactgatgatggatcagcctgttatttaacagacagagcaaggatactagataagatagtgtccagcaatgctgaagaggctaaggaagatttggatgttgatgacatcatgggcattaatttttagttaattaaaataacaacaggacaaataatggaggcctacttggtagagatgtaccatggtgtcccatatacagctgcagtacagctaaacttggttgaaaaacattcagccaacatatcactaactgtgtggataccgatgtttcaaacatctctaccaaagaactccgttatggacctgctacatgatgttacagtcatttgtacacagatatcaacagtgcatggtcccatgatcaaggtagatctgagctcttccaatgcaggtttagctaccatgccaaggcaattcttgataaatgctatcatagctttggatgactggggcaacatggattacgaagtgcctgttgcttttgataaaaagagcttctgtgtgacaattcttaagcctaaaaacatgctttacactgtacccagcattactcccactaatcgacctactcatgagctgatagctgtctgctctttccataacagggtaacattaaagtcattcaatatacctgtcttcatcagagcactgtctatcagacagcaggaccttgatagtgtggagcaggctataagctccgatgtggaccatgctataacaacagctagggtggctccctatgcagggcttacacttgtgatcaacatcacatccaccaaaggagcattcaaactgctaaaggcaggtagtcagattcttgcagaactgggtccctatctgacgcaggtgagcctacatgatgtgattatgaactggaaacatacaggcacttcctacatactcaagagctcctcaacaagtggatgaaaaagagaaagtcaccattgatcagctcaatccacaactacaaccccacgatttcacacagcacaacaaccaccgccaccaacatccacatgacaaccacacatacacacccacatacatatatacacatatcttagttaaataaaatcaggataaataatggatcctaacatgacctcacaccagatcaccctcgagatcaacatgaccagcagccgtattggcacatacactacaccagccccaacagctcttctccttgcatgtgccgtcatcaacacagtgtgtgcgctgataatggcctgcagcagtagaagcactgccacatcaggcattgtcagcagccaatgcacagttcatcccaatcaccctccaccaagttatggcgtcaatgtaactggtctgccgggtaacctatactcaaggaacactacataacattataaataacagaaattatccttcaataaaccccaggccagacagctttaccctgctagacgattcaatcagcccttgcagtatgtcgtctagttaacaaaaaaccggtaggataagtactatcctattggaaccaaacgagacctgtagagcagctcacacaagagaaccacaagctgacttcacctagtatgggaaggaacttagaagtgagtggcagcattaccaatttgaactttgagagaactcagcatcctgacacatttaggactgttgtaaaagtgaaccaaatgtgtaagcttattgcaggtgtgctcacaagtgctgctgtggcagtttgtgtgggggtcataatgtattctgttttcacatcaaaccacaaggccaactccacgcagaatgccacgacccggaacagcacatccacccctccccaaccaaccgccggtctgcccaccacagagcaagggaccatccccagattcaccaaaccccccaccaaaaccgccacccaccatgagatcacagagcccgtcaaaatggcaacaccttcagaggatccctaccaatgctccagcaatggttatttggaccgacctgatttacctgaaaatttcaaactcgtattggatgttatatgcaagcctccaggtcctgaacatcacaacaccagctgttatgagaaacgtgaaatcaacccaggaagtgtttgccctgatcttgtaacaatgaaggcaaacatgggcttaaacaatggtggtggggaggatgctgcaccttatatagaggttaccaccctttctacgtactccaacaaaagggcaatgtgtgtccacaatgggtgtgatcaaggcttctgtttcttcctttctggtttaagcactgatcaggagagagctgtgctagagcttggaggtcaacaggctatcatggagttgcattatgattcctactggaaacactattggagtaactctaattgtgttgttcccagaacaaactgcaacctgacagaccaaactgagattttgtttcctaggtttaacaacaagaatcagtctcagtgtaccacctgtgcagattcagctggcctagataacaaattttatctcacatgtgatgggcttttaagaaccctccctctagttggactacccagcctaagtcctcaggcttacaaagctgtacccacacaaactacaggcaccaccacggcaccaacatcagagacgaggcacccaacccctgcacccaggaggtccaaacctctcagtcggaagaagagagctttatgtggtgtagactcaagcagagaacccaaaccaacaatgccttactggtgtcctatgctccaattatttccaaggaggtctaattcttaagtgacctattcctgaattaacttcagaataagtaccaaccttatcagtagttaatgaaaactaagctttgatataataggacaaatatgattcctggcaggatctttctagtccttctggtgatcttcaacaccaagccaattcacccaaatacattaacagaaaaattctatgagtccacatgtagtgttgagactgcaggttataagagtgcccttagaacaggttggcatatgacagttatgtcaattaagttgtctcaaataaatattgagtcatgcaagagcagcaactcgttattggctcatgagcttgcaatctatagtagtgcagtggatgaattgagaacgttatcatccaatgccttgaagtccaaaaggaagaagaggttcctcggtttgattcttggtctcggagctgcagtcactgccggggtggctttagccaagacagtgcaacttgaaagtgagattgcattgattagagatgcagtgagaaatacaaatgaggctgttgttagcctaaccaacggcatgtcagtgttggctaaagtggtggatgatttgaaaaacttcatatctaaagaattactcccaaaaataaaccgagtctcttgtgatgtgcacgacatcactgccgtcattagattccaacagctcaacaaaagacttttggaagtatctcgtgaattttcatctaatgcaggattaacacacactgtttcatcttttatgttaacagaccgggaactcacctccattgtaggcggcatggctgtttcagcaggccaaaaagagataatgctatctagcaaagctataatgagaagaaatgggttagcaatattaagttcagtcaacgctgacacactggtttatgtaatacaactcccattatttggtgttatggacacagattgttgggtaataagaagttctatagactgtcataacatagcagacaagtatgcttgtttggctagagctgataatggctggtattgtcacaatgctggctcattatcatacttcccgtcgccaacggattgtgagatccacaatgggtatgctttctgtgacactctaaaaagtctaactgtacctgtaacatcacgagaatgcaactcaaacatgtataccactaactacgattgtaagatttccacaagtaaaacttatgtgagtacagcggtactgactacaatgggttgcttggtatcttgttatggtcataacagttgcacagtcatcaataatgacaaaggtataataaggactctgccagatggttgccactacatctccaacaaaggtgtggacagggttcaagtaggtaacactgtttactatcttagcaaagaagttggcaagtcaattgttgtcagaggggaaccattggtcttgaaatatgaccctttgagtttccctgacgataaatttgatgttgctataagagatgtggagcatagcatcaatcagacacgcacattcttgaaggcctctgatcagttattggacttaagtgaaaacagagagaataaaaatttaaacaagtcatatatactaacaactctgctcttcgttgtaatgcttattataataatggctgtcatagggttcattctgtataaggtattgaaaatgatcagagacaacaagttgaaatccaaaagtacacctggcctcacagttttatcatgacaattgtaccaaaccataattgagttagttaattaaaaacttaggataagtgacaatccagacccaacacctctttcaactctcaaggataaggtaggatgagtgtgagaccttgcaaatttgaggttcaagggttttgttccagagggaggaattgcaagtatagtcataaatattgggaatggcctttgaaaactcttatgctcaggcagaactacatgcttaataggatttataggttcctcgacaccaacacagatgcaatgtcagatgtcagcggatttgatgcaccacaaaggactgctgagtatgccttgggaaccataggtgtgctgaaaagttacctggaaaaaactaacaacatcactaaatcaatagcttgtggcagtttgatcactgtattgcagaacttggatgttggtctagtaatacaagcaagagatagcaacactgaggacaccaattacttgagaagttgcaacactatactgtcttatatagacaagatacacaagaagagacaaattattcacattctcaaaagactgccagtaggagtactatgcaatctgatccaatctgtcatctccatcgaggagaagataaattcttctatgaaaacagaatgataaggctgcctaaatactatccagccatactgcataagatgtatattattagagtaaatagaaacctcacttacgatgggtctggaccatccacaataatagatgcaggaaagtctgtggtgtggaatcgtgttgatgtgatagcttgtgtgaaagaggccttgtgctgcatagaattcagctggaataaccaagtgatcatagactttgattatagccaggccagatgatgtggactgtattcctttttttgtcagtaatcagttattaacccaaaattgttaattatgtagactttaagttaactaacttcatgttaattcaatagttatataaaaaaatattcgaattaggatcaatatggatcctattgatgaacaagaagttaatgtgtacttgccggatagctacttaaagggtgttatatcttttagtgaaactaatgctcttggcagctgtatcattggtagacctttcttgaaggatgactttactgccactacttcaatccgtaaccccctaattgaacataaaagaataagggacactaaattagtaaaaaatattgtttcaaaccctcaatataggttagtggagcctctccaaatgcagcatgagctcttgagtgtactatcgcccaatttcatattgcacactgccaacttaaggaaaattatacaaagaagtgttgacataacagataaaaagttgaaccccattttgcacattttgaatcttaattctcctaaccaagagggtaaggtgtcggaacggctaactaggctaattaagaaacatctctctcacatacctaattgggtaagcagctggtacaatatatgggtcaatcttaacaacttactgcaggagtaccgttcaaaggaagttatagaccataactgtgttctgactaggcaattgtctggaagtttcatacatgtggtcatgagtcaatatggagttgtgataattagcaaaaaaagtaaaagatatacaatgtgtacttataaccaattcctaacctggaaggaccttgccttgagcagatttaatgccaattatgtggtctggctaagtaatgtgttaaacacactcaacgaggggttgggattaaggtgtagattaaaaggtcatctgctcagtaagttgtacatttccactgacatctttttatcttcaacatctaatgaattttataatgtggtcaaggaatttgagggcttcatcatgtcactgatattgaaacaaactgaggaagccttatttagcacaaggttttataataacatgttgaacaacttaattgatgccattgatagggctcgactagagtatctggcccgctgtgccaattcagctgccaggattaatttacctagtacagatgttatgatagcatcattgggtgatatcttatctttgataaacgttttaggtgaatccaaccttaacaacttaagtgagttatattttatcttcaggatatttggtcaccctatggttgatgagaggaaggccatggatgcagtcagagataactgttgtgaaacaaagtttctgacggctaagaaccttgcatcgttaagaggagcatatgtttatagaattatcaaaggattcgtagcaaattataacaggtggccttacataaaaactagagtttgccttacaccaacatggattaactatcttgacaccaattcatgtccctcattattagagatgacagaagatgattttattgtgttagctggagtgcactttataagagaattccacatcccaaagctaactgatctggagattatattaaatgacaaggccatatctcctccaaaatcactcatttggtcatgctttccaaaaaactacatacctcaggttatacaagatgagtatgcccggaggtattgtagagctaaagcacctttgaagacaagacgtgtcttggagttctacttacaggacaaggatttcaagttggatcagctccatagagtagtagtgaaccaggactaccttaatgataaagaacatataatttctttaacaggaaaagaaagagagttgggtgttggtaggatgtttgccatgcaacctgggaagcagaggcaagtccaaattttagcagagaagctgttggctgataacatcctgcaattctttccggagacactgactagatacggtgatttggagctgcaaaagatactagagttaaaagctggactttcaaataaaaatgacagatctaaagactcctacaataattatataagtaggtgctcattaattactgatttaagtaaatttaaccaagcttttaggtacgagtcatcctgtgtgtgtagtgatcttttagatgagctacatgggactcaaagcttattctcttggctgcatttaacagtaccactgactactataatgtgtacatataggcatgcgccgccggacactggaaacaactataatgtagatgatattgctgagcagagtggactctaccgctaccacatgggcgggattgagggctggtgccagaagctctggacaacagaggccattgctttgctagatactgtagctgtgaagggccgtttccagctaacttcattaataaatggcgacaaccaaagtattgatatttcaaaaccaacaaggctggggaccaggactcaaagtgaagcagattatgatttggcaataaattctttaagattaatatcagcagcttataaaggcattggacataaattaaaagaaggtgagacctacttgtcacgtgacatgcagttcatgagtaaaacaatacaacatgaaggggtctactacccggcctccatcaagaaaatattaagagttggtccctggatcaacacaatattagatgatataaaaacttcaacagaaagtattggttctctaactcaagaactagaatataaaggtgaaagtttaatgagcagcctgctgctgaggaacttctggctctacagattatattcagtggatttaaaagatcattctttgtgtggaaagcagctctacagatccttaataaaagtgttaaaacatttgaagaggtgcttcaacctggagaaccttggggaatgtttggaattatttttaaatgtgcccatgcagtttggaggtgctgacccaaatgtcatctacaggagcttctacagaagaactccagattttctaacagaaagtataactcatctcatcctcattttaaaacattttagaagagatttggaattcaacaaagataatgtctccaaagctgttctttctttgctagagttcaccaagaatgattctgcagaatttgtaactttgatgagagatcctcaagcaattggtagtgagaggcaggccaagatcacttcagacatcaacagaacagctgtaacttcagtgttatcaaatgctccaaatgaaatatttagaacttcagctcttcattacagcagcacagaaaatgaattaaatggaatagcaagtggagtttctcctgtttatcctcatggtcttcgagttttatatgaaagtttacctttttataaagcagagaagattgtcaacatggtttctgggaccaagtccatcaccaacatactggagaagacatcagccatctcctacacagatataattcgagccaccaacatgatggtggagaacctcactttgctaacaagaataatgaaaccaggtgctgacacatctttggatcctgacacaatagtaataacaatattatcaaaaataataagagataaatcctgggatgttggtgatataattggtgtcacttccccatctcctgtctcctgcttcaaggtggtctacacatcaactctacaaaataattcagtagtaatagaaagatacacaacagacacctacacaagaggtaagagaggccccaccaagccctgggtgggcagcagcacacaggagaagaagtccatgcctgtctacaacagacaagttttaacaagaggacaaagagatcaaatagaaaatatagcaaagctggagtgggtgttttcttcagtagcaaatattgattctttgctaaatgagctcagcaccatgactttgggtctttctctaaggaaatgtagacaactttttccaacatatttaagtttaaacttcctgcacaggctttctgtcagcagcaggcccagagaatatccttcttctcttcctgcctacaggacaacaaattttcattttgatactggaccaataaataaagtgttaacagaaagatttggagatgaagatataaatttggtatttcaaaatgcaatatcatatggtctttccaccatgtctttggtggagcagtttactggtgtctgtccaaataaagttttgctggtgcccaagctacaagaaatacaactaatgaaagttccaatatttcaaggtggcttcaacctacaaagtataattccaataataaggcagcagcacatgttcctgcccaaccacatcactccagcccagtatattgaattatttctttcttcaaaacaatttcattcaagaataaatttaaaacacaacaacagatttaaacttgttttacaaaaagattattttaatggggagaacatgatagaaactttgtccacctgtttggcaggccactggatcatcattttgatgctaatgaaggagagtcaggggatatttgacaaggagtggtatgatggttttgtaacagaccacatgttcctggacctgcagctcttcctctcctccttcaagacatttctaactgtcttcaactttgcttatttaaaagttggttcaaatatagaagaaataacaggaaatcaagccaacctgctggagctgctggacctgggctactggaagaacatgtataaagtattttcagagaccaaggtgcggctggctttgctaaaacaagatttatcatttaattctgtgaagaacagcagcagcttccggcactggtttataaattctctacaagaagtacaatgtacttctgtgccttgggtggtaaatgtaacaagaaatccaactcatttaaaaggtgttctacagtacatgaagatgatagaaagtggcatgattcaaggttattcagcaaatatttcttcagttttaagtatcccatataattatccagacatggcgcacatgatgacaaaaataataagaaatcgaggccacatgtcctatgattatccaaagatgaagaaaagtttaactttctccatgacagacatgagtgacagctacatgctcaacctcttccccaaagtagaatgttcttacatgagtggttatttggataaactagatgatactctacaacttctaaagaaacctcctgttggaagaaaagttccttctgtggctttgccctggcaccactgcaacagatacaactttgtcttcagcagcacaggctgcaaagtttctgtcattgacatgcttccaaaacatttccgaagaagtaatttaaaagtaatatgttttattggagaaggggcgggcaacctcatgctaagagctgttttggaagttggtggaaatataaaattaatatatagatccttaaaagatcctgatgatcatcatgttcctgtagaatttctaagattaaaaccttgttatccttatattgatactggtggcagtttatctttggcttcaacagatgccaccaacaaggcccactgggattatttacatcttcactggacagatcctttaaatttaatagtatgtgatgcagaaataagtggtgtgaagcactggctaaaaattcttcacaggtggtatgagcacatgacttcctgcaagcactgtttaaaatcagaacatgataaatatttaataataaaatatcatgctcaagatgatttaatagatcttcctcatggtgtcaggctactaaaatgtaacatctgcctgggctccaaactaagtggcagtgagagctacctgctcattggtcttggtctttcaaataaacttcctgtctacagtgaagttcttcattcaaaacttcttttggcagaatgtcatcagtttcatcatccaaaatatttggatgtttctggaataaatacaaatataaaatccttaataccaatgttggattatccaataacttacaacaagatcaccactttgctagaaagtgtgcgggagctttcttcaaataaaaacaagaacaccatgtggattggaagaaatcctgtctaccataataaatggctaaagaggaaatatttcaacattttaaaatggctaaaatactgtatagaacttcctgccttcaggatggattataattcatttgagagaatagaaatgctttatccaaatttaagagatttggtagattctgtttctacttcagagctgaagaaagtaataaaagtaacaggcatcctcttcaggagcaacaccatgtgaattaatatgccaatgctaacatgtcatccccactactttttttgttcaatcactctcagtctagacatgtgagaagatcccaaacccaactgcacccctcccactcgaaatcagttgtagcctcagcagctccatctgccatgatctctgaccagcagcaaatgtattattattttaatttgtctatagttaacaaaaaattgatatctcacaggttgtaaacatagttcttttataattattgttagttaaactattgtgtttgacttcctttgggtatttttttcccgtgggtcggcatggcatctccacctcctcgcggtccgacctgggcatccgaaggaggacgcacgtccactcggatggctaagggagagcctgcagtagcataaccccttggggcctctaaacgggtcttgaggggttttttgctgaaaggaggaactatatacgcgtcgacgggcccgcgctcactggccgtcgttttacaacgtcgtgactgggaaaaccctggcgttacccaacttaatcgccttgcagcacatccccctttcgccagctggcgtaatagcgaagaggcccgcaccgatcgcccttcccaacagttgcgcagcctgaatggcgaatgggacgcgccctgtagcggcgcattaagcgcggcgggtgtggtggttacgcgcagcgtgaccgctacacttgccagcgccctagcgcccgctcctttcgctttcttcccttcctttctcgccacgttcgccggctttccccgtcaagctctaaatcgggggctccctttagggttccgatttagtgctttacggcacctcgaccccaaaaaacttgattagggtgatggttcacgtagtgggccatcgccctgatagacggtttttcgccctttgacgttggagtccacgttctttaatagtggactcttgttccaaactggaacaacactcaaccctatctcggtctattcttttgatttataagggattttgccgatttcggcctattggttaaaaaatgagctgatttaacaaaaatttaacgcgaattttaacaaaatattaacgcttacaatttaggtggcacttttcggggaaatgtgcgcggaacccctatttgtttatttttctaaatacattcaaatatgtatccgctcatgagacaataaccctgataaatgcttcaataatattgaaaaaggaagagtatgagtattcaacatttccgtgtcgcccttattcccttttttgcggcattttgccttcctgtttttgctcacccagaaacgctggtgaaagtaaaagatgctgaagatcagttgggtgcacgagtgggttacatcgaactggatctcaacagcggtaagatccttgagagttttcgccccgaagaacgttttccaatgatgagcacttttaaagttctgctatgtggcgcggtattatcccgtattgacgccgggcaagagcaactcggtcgccgcatacactattctcagaatgacttggttgagtactcaccagtcacagaaaagcatcttacggatggcatgacagtaagagaattatgcagtgctgccataaccatgagtgataacactgcggccaacttacttctgacaacgatcggaggaccgaaggagctaaccgcttttttgcacaacatgggggatcatgtaactcgccttgatcgttgggaaccggagctgaatgaagccataccaaacgacgagcgtgacaccacgatgcctgtagcaatggcaacaacgttgcgcaaactattaactggcgaactacttactctagcttcccggcaacaattaatagactggatggaggcggataaagttgcaggaccacttctgcgctcggcccttccggctggctggtttattgctgataaatctggagccggtgagcgtgggtctcgcggtatcattgcagcactggggccagatggtaagccctcccgtatcgtagttatctacacgacggggagtcaggcaactatggatgaacgaaatagacagatcgctgagataggtgcctcactgattaagcattggtaactgtcagaccaagtttactcatatatactttagattgatttaaaacttcatttttaatttaaaaggatctaggtgaagatcctttttgataatctcatgaccaaaatcccttaacgtgagttttcgttccactgagcgtcagaccccgtagaaaagatcaaaggatcttcttgagatcctttttttctgcgcgtaatctgctgcttgcaaacaaaaaaaccaccgctaccagcggtggtttgtttgccggatcaagagctaccaactctttttccgaaggtaactggcttcagcagagcgcagataccaaatactgtccttctagtgtagccgtagttaggccaccacttcaagaactctgtagcaccgcctacatacctcgctctgctaatcctgttaccagtggctgctgccagtggcgataagtcgtgtcttaccgggttggactcaagacgatagttaccggataaggcgcagcggtcgggctgaacggggggttcgtgcacacagcccagcttggagcgaacgacctacaccgaactgagatacctacagcgtgagctatgagaaagcgccacgcttcccgaagggagaaaggcggacaggtatccggtaagcggcagggtcggaacaggagagcgcacgagggagcttccagggggaaacgcctggtatctttatagtcctgtcgggtttcgccacctctgacttgagcgtcgatttttgtgatgctcgtcaggggggcggagcctatggaaaaacgccagcaacgcggcctttttacggttcctggccttttgctggccttttgctcacatgttctttcctgcgttatcccctgattctgtggataaccgtattaccgcctttgagtgagctgataccgctcgccgcagccgaacgaccgagcgcagcgagtcagtgagcgaggaagcggaagagcgcccaatacgcaaaccgcctctccccgcgcgttggccgattcattaatgcagctggcacgacaggtttcccgactggaaagcgggcagtgagcgcaacgcaattaatgtgagttagctcactcattaggcaccccaggctttacactttatgcttccggctcgtatgttgtgtggaattgtgagcggataacaatttcacacaggaaacagctatgaccatgattacgccaagcgcgcccgggtaatacgactcactataggg

SEQ ID NO: 5 - DNA, 18762 bp, synthetic construct
  source 1..18762: mol_type = other DNA
acgcgaaaaaatgcataacaaaactatcaacctgaaaaaagttaggacaagtgaagattgctagtcccaaagaccagaatcatgggctgtaatgtgatgatggagcttgattatggtggacgagctgcatggctggcattccacataaccaactttgataggtcagatttggaaactatcctaagaggtgctagggtgtgcaatacatggcaagatcagagactctccgtgtaccttgtgggaagggattgcaatttgttaagaccatttgtgcaagctgccaaatttatccataatactaggagaggccaaacattaacacattggttcacaaaaaatatcgtgtttagttctacagggcaagagacagagcctcccattgaccccacatgtgagctgttggtagagctgatcagtggttaagatgacagcacattatgtagttaattaaaacaaagggtaggacaagtcctaatgtccacagctatgaacaagttcactcagaccatctctaaacctgccactatcttgaatatttcagacagtgaagagtcgggcgatgaggcaggggtgggcaaggtgtcccgtaccacacagagctcagagaggtggcttgatttgctcattgaaaagttccagccgagcctacaaaacatcactagatacatcaactggaacttcatcaggatctgcaatgataggcttaaaaaagaaaaaatggggtacattgaggccaagcaatatgtggaagacatggcttggatggtgatagcatctgaggcagacagcattgagtggaagtgcataaggaggcaggagaaagtgactggggtgaaatacccaaagttcttctttgtacaacacaaagaggactggattgagtgcacaggatgcattccgtacccaggccatgacttgatctatgatgaggatgatgatgactgagctgactcagatcactccaaccagcagagagatccatagttatagaaaaacattaggataaatacacatcctaggccgccaccatgtttgtttttcttgttttattgccactagtctctagtcagtgtgttaatcttacaaccagaactcaattaccccctgcatacactaattctttcacacgtggtgtttattaccctgacaaagttttcagatcctcagttttacattcaactcaggacttgttcttacctttcttttccaatgttacttggttccatgctatacatgtctctgggaccaatggtactaagaggtttgataaccctgtcctaccatttaatgatggtgtttattttgcttccactgagaagtctaacataataagaggctggatttttggtactactttagattcgaagacccagtccctacttattgttaataacgctactaatgttgttattaaagtctgtgaatttcaattttgtaatgatccatttttgggtgtttattaccacaaaaacaacaaaagttggatggaaagtgagttcagagtttattctagtgcgaataattgcacttttgaatatgtctctcagccttttcttatggaccttgaaggaaaacagggtaatttcaaaaatcttagggaatttgtgtttaagaatattgatggttattttaaaatatattctaagcacacgcctattaatttagtgcgtgatctccctcagggtttttcggctttagaaccattggtagatttgccaataggtattaacatcactaggtttcaaactttacttgctttacatagaagttatttgactcctggtgattcttcttcaggttggacagctggtgctgcagcttattatgtgggttatcttcaacctaggacttttctattaaaatataatgaaaatggaaccattacagatgctgtagactgtgcacttgaccctctctcagaaacaaagtgtacgttgaaatccttcactgtagaaaaaggaatctatcaaacttctaactttagagtccaaccaacagaatctattgttagatttcctaatattacaaacttgtgcccttttggtgaagtttttaacgccaccagatttgcatctgtttatgcttggaacaggaagagaatcagcaactgtgttgctgattattctgtcctatataattccgcatcattttccacttttaagtgttatggagtgtctcctactaaattaaatgatctctgctttactaatgtctatgcagattcatttgtaattagaggtgatgaagtcagacaaatcgctccagggcaaactggaaagattgctgattataattataaattaccagatgattttacaggctgcgttatagcttggaattctaacaatcttgattctaaggttggtggtaattataattacctgtatagattgtttaggaagtctaatctcaaaccttttgagagagatatttcaactgaaatctatcaggccggtagcacaccttgtaatggtgttgaaggttttaattgttactttcctttacaatcatatggtttccaacccactaatggtgttggttaccaaccatacagagtagtagtactttcttttgaacttctacatgcaccagcaactgtttgtggacctaaaaagtctactaatttggttaaaaacaaatgtgtcaatttcaacttcaatggtttaacaggcacaggtgttcttactgagtctaacaaaaagtttctgcctttccaacaatttggcagagacattgctgacactactgatgctgtccgtgatccacagacacttgagattcttgacattacaccatgttcttttggtggtgtcagtgttataacaccaggaacaaatacttctaaccaggttgctgttctttatcaggatgttaactgcacagaagtccctgttgctattcatgcagatcaacttactcctacttggcgtgtttattctacaggttctaatgtttttcaaacacgtgcaggctgtttaataggggctgaacatgtcaacaactcatatgagtgtgacatacccattggtgcaggtatatgcgctagttatcagactcagactaattctcctcggcgggcacgtagtgtagctagtcaatccatcattgcctacactatgtcacttggtgcagaaaattcagttgcttactctaataactctattgccatacccacaaattttactattagtgttaccacagaaattctaccagtgtctatgaccaagacatcagtagattgtacaatgtacatttgtggtgattcaactgaatgcagcaatcttttgttgcaatatggcagtttttgtacacaattaaaccgtgctttaactggaatagctgttgaacaagacaaaaacacccaagaagtttttgcacaagtcaaacaaatttacaaaacaccaccaattaaagattttggtggttttaatttttcacaaatattaccagatccatcaaaaccaagcaagaggtcatttattgaagatctacttttcaacaaagtgacacttgcagatgctggcttcatcaaacaatatggtgattgccttggtgatattgctgctagagacctcatttgtgcacaaaagtttaacggccttactgttttgccacctttgctcacagatgaaatgattgctcaatacacttctgcactgttagcgggtacaatcacttctggttggacctttggtgcaggtgctgcattacaaataccatttgctatgcaaatggcttataggtttaatggtattggagttacacagaatgttctctatgagaaccaaaaattgattgccaaccaatttaatagtgctattggcaaaattcaagactcactttcttccacagcaagtgcacttggaaaacttcaagatgtggtcaaccaaaatgcacaagctttaaacacgcttgttaaacaacttagctccaattttggtgcaatttcaagtgttttaaatgatatcctttcacgtcttgacaaagttgaggctgaagtgcaaattgataggttgatcacaggcagacttcaaagtttgcagacatatgtgactcaacaattaattagagctgcagaaatcagagcttctgctaatcttgctgctactaaaatgtcagagtgtgtacttggacaatcaaaaagagttgatttttgtggaaagggctatcatcttatgtccttccctcagtcagcacctcatggtgtagtcttcttgcatgtgacttatgtccctgcacaagaaaagaacttcacaactgctcctgccatttgtcatgatggaaaagcacactttcctcgtgaaggtgtctttgtttcaaatggcacacactggtttgtaacacaaaggaatttttatgaaccacaaatcattactacagacaacacatttgtgtctggtaactgtgatgttgtaataggaattgtcaacaacacagtttatgatcctttgcaacctgaattagactcattcaaggaggagttggataagtattttaagaatcatacatcaccagatgttgatttaggtgacatctctggcattaatgcttcagttgtaaacattcaaaaagaaattgaccgcctcaatgaggttgccaagaatttaaatgaatctctcatcgatctccaagaacttggaaagtatgagcagtacatcaagtggccatggtacatttggctaggttttatagctggcttgattgccatagtaatggtgacaattatgctttgctgtatgaccagttgctgtagttgtctcaagggctgttgttcttgtggatcctgctgcaaatttgatgaagacgactctgagccagtgctcaaaggagtcaaattacattacacataatgaccacctatagcaagtgatgtagtatttagtctatgattagttatagaaaaacattaggataaatacacatcctaggccgggccaaaatgtctctagacagattgaagctcaatgatgtctcaaacaaggatagcctgctgtccaactgcaaatacagtgttaccagatccacaggcgatgtaaccagtgtgtctggtcatgctatgcagaaagcccttgcaaggacactcggcatgttcttacttactgccttcaaccgttgcgaagaagtggcagaaatagggctccaatatgccatgtccttgctaggcagagatgatagcatcaagatattaagagaagccggctacaatgtaaaatgtgtggacacacagctcaaggactttacaatcaaattacaaggaaaggaatacaaaatacaagtcctagatatagtgggaatagatgcagccaatttagctgatctagagatacaagccagaggagtggtagcaaaagaactcaaaacaggagccaggctacctgacaatcggaggcatgatgcaccagattgtggtgtgatagttctctgtattgcagcattagttgtttccaaattagctgcaggggacaggggaggacttgatgctgtggaaagaagggctttaaatgtgctgaaagccgagaaagccaggtaccccaacatggaggtcaagcagatagctgaaagtttttatgatctgtttgaaaggaagccttattacattgatgtcttcatcacttttggcctggcccagtctagtgtcaagggaggcagcaaagttgaggggctgttttcaggtctcttcatgaatgcatacggggcaggacaagttatgctgaggtggggtttactggcaaaatctgtcaagaacatcatgctaggccatgctagtgtacaagctgagatggaacaggtggttgaggtttacgaatatgctcagaagcaaggaggggaggcaggattctatcacatcagaaataatccaaaagcttcacttctctctttgaccaattgtcctaatttcaccagtgttgtgcttggcaatgctgcaggtttaggcatcatagggtcatataagggtgctcctaggaatagagaactctttgatgctgccaaagattatgcagaaagattaaaggacaacaatgtaattaactacagtgcattaaacttgactgcagaagaaagagagctgatcagccagcagctgaacattgttgatgacactcctgatgatgatatttaattaaaactggaaaatgtaggataaatatggagaaattcgcccccgaatttgttggcgaggatgctaacaagaaggcagaggagtttctcaaacatagatccttcccttcggaaaaaccactagctggtataccgaacactgccactcatgtcaccaaatataacatgccccctatattgcgtagctcattcaaactcccttccccgagagttgctgcaaatcttactgaaccctctgctccccctaccactccaccacccacacctccccagaacaaggaagagcagcccaaagagtctgatgttgacattgagactatgcatgtctgtaaggttcctgacaatccggaacacagcaagaagccatgctgctcagatgataccgatactaagaaaactaggaagccgatggtcacctttgtggaacccgaggagaaatttgtcggattgggagctagcttgtacagggagaccatgcagacctttgctgctgatggttatgatgaagaaagcaacctatcgtttgaggagactaaccaagagccgggttcttcatctgtagaacaaagactagatagaatagaggagaaattgtcctacataataggccttttaaacaccataatggtagcgactgctggacctaccactgctagagatgagattagagatgcccttataggcactagagaagaacttattgagatgatcaagtctgacatcttgactgtcaatgacagaatagtggccatggagaagctcagagatgaggaatgctccagagctgacactgatgatggatcagcctgttatttaacagacagagcaaggatactagataagatagtgtccagcaatgctgaagaggctaaggaagatttggatgttgatgacatcatgggcattaatttttagttaattaaaataacaacaggacaaataatggaggcctacttggtagagatgtaccatggtgtcccatatacagctgcagtacagctaaacttggttgaaaaacattcagccaacatatcactaactgtgtggataccgatgtttcaaacatctctaccaaagaactccgttatggacctgctacatgatgttacagtcatttgtacacagatatcaacagtgcatggtcccatgatcaaggtagatctgagctcttccaatgcaggtttagctaccatgccaaggcaattcttgataaatgctatcatagctttggatgactggggcaacatggattacgaagtgcctgttgcttttgataaaaagagcttctgtgtgacaattcttaagcctaaaaacatgctttacactgtacccagcattactcccactaatcgacctactcatgagctgatagctgtctgctctttccataacagggtaacattaaagtcattcaatatacctgtcttcatcagagcactgtctatcagacagcaggaccttgatagtgtggagcaggctataagctccgatgtggaccatgctataacaacagctagggtggctccctatgcagggcttacacttgtgatcaacatcacatccaccaaaggagcattcaaactgctaaaggcaggtagtcagattcttgcagaactgggtccctatctgacgcaggtgagcctacatgatgtgattatgaactggaaacatacaggcacttcctacatactcaagagctcctcaacaagtggatgaaaaagagaaagtcaccattgatcagctcaatccacaactacaaccccacgatttcacacagcacaacaaccaccgccaccaacatccacatgacaaccacacatacacacccacatacatatatacacatatcttagttaaataaaatcaggataaataatggatcctaacatgacctcacaccagatcaccctcgagatcaacatgaccagcagccgtattggcacatacactacaccagccccaacagctcttctccttgcatgtgccgtcatcaacacagtgtgtgcgctgataatggcctgcagcagtagaagcactgccacatcaggcattgtcagcagccaatgcacagttcatcccaatcaccctccaccaagttatggcgtcaatgtaactggtctgccgggtaacctatactcaaggaacactacataacattataaataacagaaattatccttcaataaaccccaggccagacagctttaccctgctagacgattcaatcagcccttgcagtatgtcgtctagttaacaaaaaaccggtaggataagtactatcctattggaaccaaacgagacctgtagagcagctcacacaagagaaccacaagctgacttcacctagtatgggaaggaacttagaagtgagtggcagcattaccaatttgaactttgagagaactcagcatcctgacacatttaggactgttgtaaaagtgaaccaaatgtgtaagcttattgcaggtgtgctcacaagtgctgctgtggcagtttgtgtgggggtcataatgtattctgttttcacatcaaaccacaaggccaactccacgcagaatgccacgacccggaacagcacatccacccctccccaaccaaccgccggtctgcccaccacagagcaagggaccatccccagattcaccaaaccccccaccaaaaccgccacccaccatgagatcacagagcccgtcaaaatggcaacaccttcagaggatccctaccaatgctccagcaatggttatttggaccgacctgatttacctgaaaatttcaaactcgtattggatgttatatgcaagcctccaggtcctgaacatcacaacaccagctgttatgagaaacgtgaaatcaacccaggaagtgtttgccctgatcttgtaacaatgaaggcaaacatgggcttaaacaatggtggtggggaggatgctgcaccttatatagaggttaccaccctttctacgtactccaacaaaagggcaatgtgtgtccacaatgggtgtgatcaaggcttctgtttcttcctttctggtttaagcactgatcaggagagagctgtgctagagcttggaggtcaacaggctatcatggagttgcattatgattcctactggaaacactattggagtaactctaattgtgttgttcccagaacaaactgcaacctgacagaccaaactgagattttgtttcctaggtttaacaacaagaatcagtctcagtgtaccacctgtgcagattcagctggcctagataacaaattttatctcacatgtgatgggcttttaagaaccctccctctagttggactacccagcctaagtcctcaggcttacaaagctgtacccacacaaactacaggcaccaccacggcaccaacatcagagacgaggcacccaacccctgcacccaggaggtccaaacctctcagtcggaagaagagagctttatgtggtgtagactcaagcagagaacccaaaccaacaatgccttactggtgtcctatgctccaattatttccaaggaggtctaattcttaagtgacctattcctgaattaacttcagaataagtaccaaccttatcagtagttaatgaaaactaagctttgatataataggacaaatatgattcctggcaggatctttctagtccttctggtgatcttcaacaccaagccaattcacccaaatacattaacagaaaaattctatgagtccacatgtagtgttgagactgcaggttataagagtgcccttagaacaggttggcatatgacagttatgtcaattaagttgtctcaaataaatattgagtcatgcaagagcagcaactcgttattggctcatgagcttgcaatctatagtagtgcagtggatgaattgagaacgttatcatccaatgccttgaagtccaaaaggaagaagaggttcctcggtttgattcttggtctcggagctgcagtcactgccggggtggctttagccaagacagtgcaacttgaaagtgagattgcattgattagagatgcagtgagaaatacaaatgaggctgttgttagcctaaccaacggcatgtcagtgttggctaaagtggtggatgatttgaaaaacttcatatctaaagaattactcccaaaaataaaccgagtctcttgtgatgtgcacgacatcactgccgtcattagattccaacagctcaacaaaagacttttggaagtatctcgtgaattttcatctaatgcaggattaacacacactgtttcatcttttatgttaacagaccgggaactcacctccattgtaggcggcatggctgtttcagcaggccaaaaagagataatgctatctagcaaagctataatgagaagaaatgggttagcaatattaagttcagtcaacgctgacacactggtttatgtaatacaactcccattatttggtgttatggacacagattgttgggtaataagaagttctatagactgtcataacatagcagacaagtatgcttgtttggctagagctgataatggctggtattgtcacaatgctggctcattatcatacttcccgtcgccaacggattgtgagatccacaatgggtatgctttctgtgacactctaaaaagtctaactgtacctgtaacatcacgagaatgcaactcaaacatgtataccactaactacgattgtaagatttccacaagtaaaacttatgtgagtacagcggtactgactacaatgggttgcttggtatcttgttatggtcataacagttgcacagtcatcaataatgacaaaggtataataaggactctgccagatggttgccactacatctccaacaaaggtgtggacagggttcaagtaggtaacactgtttactatcttagcaaagaagttggcaagtcaattgttgtcagaggggaaccattggtcttgaaatatgaccctttgagtttccctgacgataaatttgatgttgctataagagatgtggagcatagcatcaatcagacacgcacattcttgaaggcctctgatcagttattggacttaagtgaaaacagagagaataaaaatttaaacaagtcatatatactaacaactctgctcttcgttgtaatgcttattataataatggctgtcatagggttcattctgtataaggtattgaaaatgatcagagacaacaagttgaaatccaaaagtacacctggcctcacagttttatcatgacaattgtaccaaaccataattgagttagttaattaaaaacttaggataagtgacaatccagacccaacacctctttcaactctcaaggataaggtaggatgagtgtgagaccttgcaaatttgaggttcaagggttttgttccagagggaggaattgcaagtatagtcataaatattgggaatggcctttgaaaactcttatgctcaggcagaactacatgcttaataggatttataggttcctcgacaccaacacagatgcaatgtcagatgtcagcggatttgatgcaccacaaaggactgctgagtatgccttgggaaccataggtgtgctgaaaagttacctggaaaaaactaacaacatcactaaatcaatagcttgtggcagtttgatcactgtattgcagaacttggatgttggtctagtaatacaagcaagagatagcaacactgaggacaccaattacttgagaagttgcaacactatactgtcttatatagacaagatacacaagaagagacaaattattcacattctcaaaagactgccagtaggagtactatgcaatctgatccaatctgtcatctccatcgaggagaagataaattcttctatgaaaacagaatgataaggctgcctaaatactatccagccatactgcataagatgtatattattagagtaaatagaaacctcacttacgatgggtctggaccatccacaataatagatgcaggaaagtctgtggtgtggaatcgtgttgatgtgatagcttgtgtgaaagaggccttgtgctgcatagaattcagctggaataaccaagtgatcatagactttgattatagccaggccagatgatgtggactgtattcctttttttgtcagtaatcagttattaacccaaaattgttaattatgtagactttaagttaactaacttcatgttaattcaatagttatataaaaaaatattcgaattaggatcaatatggatcctattgatgaacaagaagttaatgtgtacttgccggatagctacttaaagggtgttatatcttttagtgaaactaatgctcttggcagctgtatcattggtagacctttcttgaaggatgactttactgccactacttcaatccgtaaccccctaattgaacataaaagaataagggacactaaattagtaaaaaatattgtttcaaaccctcaatataggttagtggagcctctccaaatgcagcatgagctcttgagtgtactatcgcccaatttcatattgcacactgccaacttaaggaaaattatacaaagaagtgttgacataacagataaaaagttgaaccccattttgcacattttgaatcttaattctcctaaccaagagggtaaggtgtcggaacggctaactaggctaattaagaaacatctctctcacatacctaattgggtaagcagctggtacaatatatgggtcaatcttaacaacttactgcaggagtaccgttcaaaggaagttatagaccataactgtgttctgactaggcaattgtctggaagtttcatacatgtggtcatgagtcaatatggagttgtgataattagcaaaaaaagtaaaagatatacaatgtgtacttataaccaattcctaacctggaaggaccttgccttgagcagatttaatgccaattatgtggtctggctaagtaatgtgttaaacacactcaacgaggggttgggattaaggtgtagattaaaaggtcatctgctcagtaagttgtacatttccactgacatctttttatcttcaacatctaatgaattttataatgtggtcaaggaatttgagggcttcatcatgtcactgatattgaaacaaactgaggaagccttatttagcacaaggttttataataacatgttgaacaacttaattgatgccattgatagggctcgactagagtatctggcccgctgtgccaattcagctgccaggattaatttacctagtacagatgttatgatagcatcattgggtgatatcttatctttgataaacgttttaggtgaatccaaccttaacaacttaagtgagttatattttatcttcaggatatttggtcaccctatggttgatgagaggaaggccatggatgcagtcagagataactgttgtgaaacaaagtttctgacggctaagaaccttgcatcgttaagaggagcatatgtttatagaattatcaaaggattcgtagcaaattataacaggtggccttacataaaaactagagtttgccttacaccaacatggattaactatcttgacaccaattcatgtccctcattattagagatgacagaagatgattttattgtgttagctggagtgcactttataagagaattccacatcccaaagctaactgatctggagattatattaaatgacaaggccatatctcctccaaaatcactcatttggtcatgctttccaaaaaactacatacctcaggttatacaagatgagtatgcccggaggtattgtagagctaaagcacctttgaagacaagacgtgtcttggagttctacttacaggacaaggatttcaagttggatcagctccatagagtagtagtgaaccaggactaccttaatgataaagaacatataatttctttaacaggaaaagaaagagagttgggtgttggtaggatgtttgccatgcaacctgggaagcagaggcaagtccaaattttagcagagaagctgttggctgataacatcctgcaattctttccggagacactgactagatacggtgatttggagctgcaaaagatactagagttaaaagctggactttcaaataaaaatgacagatctaaagactcctacaataattatataagtaggtgctcattaattactgatttaagtaaatttaaccaagcttttaggtacgagtcatcctgtgtgtgtagtgatcttttagatgagctacatgggactcaaagcttattctcttggctgcatttaacagtaccactgactactataatgtgtacatataggcatgcgccgccggacactggaaacaactataatgtagatgatattgctgagcagagtggactctaccgctaccacatgggcgggattgagggctggtgccagaagctctggacaacagaggccattgctttgctagatactgtagctgtgaagggccgtttccagctaacttcattaataaatggcgacaaccaaagtattgatatttcaaaaccaacaaggctggggaccaggactcaaagtgaagcagattatgatttggcaataaattctttaagattaatatcagcagcttataaaggcattggacataaattaaaagaaggtgagacctacttgtcacgtgacatgcagttcatgagtaaaacaatacaacatgaaggggtctactacccggcctccatcaagaaaatattaagagttggtccctggatcaacacaatattagatgatataaaaacttcaacagaaagtattggttctctaactcaagaactagaatataaaggtgaaagtttaatgagcagcctgctgctgaggaacttctggctctacagattatattcagtggatttaaaagatcattctttgtgtggaaagcagctctacagatccttaataaaagtgttaaaacatttgaagaggtgcttcaacctggagaaccttggggaatgtttggaattatttttaaatgtgcccatgcagtttggaggtgctgacccaaatgtcatctacaggagcttctacagaagaactccagattttctaacagaaagtataactcatctcatcctcattttaaaacattttagaagagatttggaattcaacaaagataatgtctccaaagctgttctttctttgctagagttcaccaagaatgattctgcagaatttgtaactttgatgagagatcctcaagcaattggtagtgagaggcaggccaagatcacttcagacatcaacagaacagctgtaacttcagtgttatcaaatgctccaaatgaaatatttagaacttcagctcttcattacagcagcacagaaaatgaattaaatggaatagcaagtggagtttctcctgtttatcctcatggtcttcgagttttatatgaaagtttacctttttataaagcagagaagattgtcaacatggtttctgggaccaagtccatcaccaacatactggagaagacatcagccatctcctacacagatataattcgagccaccaacatgatggtggagaacctcactttgctaacaagaataatgaaaccaggtgctgacacatctttggatcctgacacaatagtaataacaatattatcaaaaataataagagataaatcctgggatgttggtgatataattggtgtcacttccccatctcctgtctcctgcttcaaggtggtctacacatcaactctacaaaataattcagtagtaatagaaagatacacaacagacacctacacaagaggtaagagaggccccaccaagccctgggtgggcagcagcacacaggagaagaagtccatgcctgtctacaacagacaagttttaacaagaggacaaagagatcaaatagaaaatatagcaaagctggagtgggtgttttcttcagtagcaaatattgattctttgctaaatgagctcagcaccatgactttgggtctttctctaaggaaatgtagacaactttttccaacatatttaagtttaaacttcctgcacaggctttctgtcagcagcaggcccagagaatatccttcttctcttcctgcctacaggacaacaaattttcattttgatactggaccaataaataaagtgttaacagaaagatttggagatgaagatataaatttggtatttcaaaatgcaatatcatatggtctttccaccatgtctttggtggagcagtttactggtgtctgtccaaataaagttttgctggtgcccaagctacaagaaatacaactaatgaaagttccaatatttcaaggtggcttcaacctacaaagtataattccaataataaggcagcagcacatgttcctgcccaaccacatcactccagcccagtatattgaattatttctttcttcaaaacaatttcattcaagaataaatttaaaacacaacaacagatttaaacttgttttacaaaaagattattttaatggggagaacatgatagaaactttgtccacctgtttggcaggccactggatcatcattttgatgctaatgaaggagagtcaggggatatttgacaaggagtggtatgatggttttgtaacagaccacatgttcctggacctgcagctcttcctctcctccttcaagacatttctaactgtcttcaactttgcttatttaaaagttggttcaaatatagaagaaataacaggaaatcaagccaacctgctggagctgctggacctgggctactggaagaacatgtataaagtattttcagagaccaaggtgcggctggctttgctaaaacaagatttatcatttaattctgtgaagaacagcagcagcttccggcactggtttataaattctctacaagaagtacaatgtacttctgtgccttgggtggtaaatgtaacaagaaatccaactcatttaaaaggtgttctacagtacatgaagatgatagaaagtggcatgattcaaggttattcagcaaatatttcttcagttttaagtatcccatataattatccagacatggcgcacatgatgacaaaaataataagaaatcgaggccacatgtcctatgattatccaaagatgaagaaaagtttaactttctccatgacagacatgagtgacagctacatgctcaacctcttccccaaagtagaatgttcttacatgagtggttatttggataaactagatgatactctacaacttctaaagaaacctcctgttggaagaaaagttccttctgtggctttgccctggcaccactgcaacagatacaactttgtcttcagcagcacaggctgcaaagtttctgtcattgacatgcttccaaaacatttccgaagaagtaatttaaaagtaatatgttttattggagaaggggcgggcaacctcatgctaagagctgttttggaagttggtggaaatataaaattaatatatagatccttaaaagatcctgatgatcatcatgttcctgtagaatttctaagattaaaaccttgttatccttatattgatactggtggcagtttatctttggcttcaacagatgccaccaacaaggcccactgggattatttacatcttcactggacagatcctttaaatttaatagtatgtgatgcagaaataagtggtgtgaagcactggctaaaaattcttcacaggtggtatgagcacatgacttcctgcaagcactgtttaaaatcagaacatgataaatatttaataataaaatatcatgctcaagatgatttaatagatcttcctcatggtgtcaggctactaaaatgtaacatctgcctgggctccaaactaagtggcagtgagagctacctgctcattggtcttggtctttcaaataaacttcctgtctacagtgaagttcttcattcaaaacttcttttggcagaatgtcatcagtttcatcatccaaaatatttggatgtttctggaataaatacaaatataaaatccttaataccaatgttggattatccaataacttacaacaagatcaccactttgctagaaagtgtgcgggagctttcttcaaataaaaacaagaacaccatgtggattggaagaaatcctgtctaccataataaatggctaaagaggaaatatttcaacattttaaaatggctaaaatactgtatagaacttcctgccttcaggatggattataattcatttgagagaatagaaatgctttatccaaatttaagagatttggtagattctgtttctacttcagagctgaagaaagtaataaaagtaacaggcatcctcttcaggagcaacaccatgtgaattaatatgccaatgctaacatgtcatccccactactttttttgttcaatcactctcagtctagacatgtgagaagatcccaaacccaactgcacccctcccactcgaaatcagttgtagcctcagcagctccatctgccatgatctctgaccagcagcaaatgtattattattttaatttgtctatagttaacaaaaaattgatatctcacaggttgtaaacatagttcttttataattattgttagttaaactattgtgtttgacttcctttgggtatttttttcccgt

SEQ ID NO: 6 - DNA, 21754 bp, synthetic construct
  source 1..21754: mol_type = other DNA
acgcgaaaaaatgcataacaaaactatcaacctgaaaaaagttaggacaagtgaagattgctagtcccaaagaccagaatcatgggctgtaatgtgatgatggagcttgattatggtggacgagctgcatggctggcattccacataaccaactttgataggtcagatttggaaactatcctaagaggtgctagggtgtgcaatacatggcaagatcagagactctccgtgtaccttgtgggaagggattgcaatttgttaagaccatttgtgcaagctgccaaatttatccataatactaggagaggccaaacattaacacattggttcacaaaaaatatcgtgtttagttctacagggcaagagacagagcctcccattgaccccacatgtgagctgttggtagagctgatcagtggttaagatgacagcacattatgtagttaattaaaacaaagggtaggacaagtcctaatgtccacagctatgaacaagttcactcagaccatctctaaacctgccactatcttgaatatttcagacagtgaagagtcgggcgatgaggcaggggtgggcaaggtgtcccgtaccacacagagctcagagaggtggcttgatttgctcattgaaaagttccagccgagcctacaaaacatcactagatacatcaactggaacttcatcaggatctgcaatgataggcttaaaaaagaaaaaatggggtacattgaggccaagcaatatgtggaagacatggcttggatggtgatagcatctgaggcagacagcattgagtggaagtgcataaggaggcaggagaaagtgactggggtgaaatacccaaagttcttctttgtacaacacaaagaggactggattgagtgcacaggatgcattccgtacccaggccatgacttgatctatgatgaggatgatgatgactgagctgactcagatcactccaaccagcagagagatccatagttatagaaaaacattaggataaatacacatcctaggccgccaccatgtttgtttttcttgttttattgccactagtctctagtcagtgtgttaatcttacaaccagaactcaattaccccctgcatacactaattctttcacacgtggtgtttattaccctgacaaagttttcagatcctcagttttacattcaactcaggacttgttcttacctttcttttccaatgttacttggttccatgctatacatgtctctgggaccaatggtactaagaggtttgataaccctgtcctaccatttaatgatggtgtttattttgcttccactgagaagtctaacataataagaggctggatttttggtactactttagattcgaagacccagtccctacttattgttaataacgctactaatgttgttattaaagtctgtgaatttcaattttgtaatgatccatttttgggtgtttattaccacaaaaacaacaaaagttggatggaaagtgagttcagagtttattctagtgcgaataattgcacttttgaatatgtctctcagccttttcttatggaccttgaaggaaaacagggtaatttcaaaaatcttagggaatttgtgtttaagaatattgatggttattttaaaatatattctaagcacacgcctattaatttagtgcgtgatctccctcagggtttttcggctttagaaccattggtagatttgccaataggtattaacatcactaggtttcaaactttacttgctttacatagaagttatttgactcctggtgattcttcttcaggttggacagctggtgctgcagcttattatgtgggttatcttcaacctaggacttttctattaaaatataatgaaaatggaaccattacagatgctgtagactgtgcacttgaccctctctcagaaacaaagtgtacgttgaaatccttcactgtagaaaaaggaatctatcaaacttctaactttagagtccaaccaacagaatctattgttagatttcctaatattacaaacttgtgcccttttggtgaagtttttaacgccaccagatttgcatctgtttatgcttggaacaggaagagaatcagcaactgtgttgctgattattctgtcctatataattccgcatcattttccacttttaagtgttatggagtgtctcctactaaattaaatgatctctgctttactaatgtctatgcagattcatttgtaattagaggtgatgaagtcagacaaatcgctccagggcaaactggaaagattgctgattataattataaattaccagatgattttacaggctgcgttatagcttggaattctaacaatcttgattctaaggttggtggtaattataattacctgtatagattgtttaggaagtctaatctcaaaccttttgagagagatatttcaactgaaatctatcaggccggtagcacaccttgtaatggtgttgaaggttttaattgttactttcctttacaatcatatggtttccaacccactaatggtgttggttaccaaccatacagagtagtagtactttcttttgaacttctacatgcaccagcaactgtttgtggacctaaaaagtctactaatttggttaaaaacaaatgtgtcaatttcaacttcaatggtttaacaggcacaggtgttcttactgagtctaacaaaaagtttctgcctttccaacaatttggcagagacattgctgacactactgatgctgtccgtgatccacagacacttgagattcttgacattacaccatgttcttttggtggtgtcagtgttataacaccaggaacaaatacttctaaccaggttgctgttctttatcaggatgttaactgcacagaagtccctgttgctattcatgcagatcaacttactcctacttggcgtgtttattctacaggttctaatgtttttcaaacacgtgcaggctgtttaataggggctgaacatgtcaacaactcatatgagtgtgacatacccattggtgcaggtatatgcgctagttatcagactcagactaattctcctcggcgggcacgtagtgtagctagtcaatccatcattgcctacactatgtcacttggtgcagaaaattcagttgcttactctaataactctattgccatacccacaaattttactattagtgttaccacagaaattctaccagtgtctatgaccaagacatcagtagattgtacaatgtacatttgtggtgattcaactgaatgcagcaatcttttgttgcaatatggcagtttttgtacacaattaaaccgtgctttaactggaatagctgttgaacaagacaaaaacacccaagaagtttttgcacaagtcaaacaaatttacaaaacaccaccaattaaagattttggtggttttaatttttcacaaatattaccagatccatcaaaaccaagcaagaggtcatttattgaagatctacttttcaacaaagtgacacttgcagatgctggcttcatcaaacaatatggtgattgccttggtgatattgctgctagagacctcatttgtgcacaaaagtttaacggccttactgttttgccacctttgctcacagatgaaatgattgctcaatacacttctgcactgttagcgggtacaatcacttctggttggacctttggtgcaggtgctgcattacaaataccatttgctatgcaaatggcttataggtttaatggtattggagttacacagaatgttctctatgagaaccaaaaattgattgccaaccaatttaatagtgctattggcaaaattcaagactcactttcttccacagcaagtgcacttggaaaacttcaagatgtggtcaaccaaaatgcacaagctttaaacacgcttgttaaacaacttagctccaattttggtgcaatttcaagtgttttaaatgatatcctttcacgtcttgacaaagttgaggctgaagtgcaaattgataggttgatcacaggcagacttcaaagtttgcagacatatgtgactcaacaattaattagagctgcagaaatcagagcttctgctaatcttgctgctactaaaatgtcagagtgtgtacttggacaatcaaaaagagttgatttttgtggaaagggctatcatcttatgtccttccctcagtcagcacctcatggtgtagtcttcttgcatgtgacttatgtccctgcacaagaaaagaacttcacaactgctcctgccatttgtcatgatggaaaagcacactttcctcgtgaaggtgtctttgtttcaaatggcacacactggtttgtaacacaaaggaatttttatgaaccacaaatcattactacagacaacacatttgtgtctggtaactgtgatgttgtaataggaattgtcaacaacacagtttatgatcctttgcaacctgaattagactcattcaaggaggagttggataagtattttaagaatcatacatcaccagatgttgatttaggtgacatctctggcattaatgcttcagttgtaaacattcaaaaagaaattgaccgcctcaatgaggttgccaagaatttaaatgaatctctcatcgatctccaagaacttggaaagtatgagcagtacatcaagtggccatggtacatttggctaggttttatagctggcttgattgccatagtaatggtgacaattatgctttgctgtatgaccagttgctgtagttgtctcaagggctgttgttcttgtggatcctgctgcaaatttgatgaagacgactctgagccagtgctcaaaggagtcaaattacattacacataatgaccacctatagcaagtgatgtagtatttagtctatgattagttatagaaaaacattaggataaatacacatcctaggccgggccaaaatgtctctagacagattgaagctcaatgatgtctcaaacaaggatagcctgctgtccaactgcaaatacagtgttaccagatccacaggcgatgtaaccagtgtgtctggtcatgctatgcagaaagcccttgcaaggacactcggcatgttcttacttactgccttcaaccgttgcgaagaagtggcagaaatagggctccaatatgccatgtccttgctaggcagagatgatagcatcaagatattaagagaagccggctacaatgtaaaatgtgtggacacacagctcaaggactttacaatcaaattacaaggaaaggaatacaaaatacaagtcctagatatagtgggaatagatgcagccaatttagctgatctagagatacaagccagaggagtggtagcaaaagaactcaaaacaggagccaggctacctgacaatcggaggcatgatgcaccagattgtggtgtgatagttctctgtattgcagcattagttgtttccaaattagctgcaggggacaggggaggacttgatgctgtggaaagaagggctttaaatgtgctgaaagccgagaaagccaggtaccccaacatggaggtcaagcagatagctgaaagtttttatgatctgtttgaaaggaagccttattacattgatgtcttcatcacttttggcctggcccagtctagtgtcaagggaggcagcaaagttgaggggctgttttcaggtctcttcatgaatgcatacggggcaggacaagttatgctgaggtggggtttactggcaaaatctgtcaagaacatcatgctaggccatgctagtgtacaagctgagatggaacaggtggttgaggtttacgaatatgctcagaagcaaggaggggaggcaggattctatcacatcagaaataatccaaaagcttcacttctctctttgaccaattgtcctaatttcaccagtgttgtgcttggcaatgctgcaggtttaggcatcatagggtcatataagggtgctcctaggaatagagaactctttgatgctgccaaagattatgcagaaagattaaaggacaacaatgtaattaactacagtgcattaaacttgactgcagaagaaagagagctgatcagccagcagctgaacattgttgatgacactcctgatgatgatatttaattaaaactggaaaatgtaggataaatatggagaaattcgcccccgaatttgttggcgaggatgctaacaagaaggcagaggagtttctcaaacatagatccttcccttcggaaaaaccactagctggtataccgaacactgccactcatgtcaccaaatataacatgccccctatattgcgtagctcattcaaactcccttccccgagagttgctgcaaatcttactgaaccctctgctccccctaccactccaccacccacacctccccagaacaaggaagagcagcccaaagagtctgatgttgacattgagactatgcatgtctgtaaggttcctgacaatccggaacacagcaagaagccatgctgctcagatgataccgatactaagaaaactaggaagccgatggtcacctttgtggaacccgaggagaaatttgtcggattgggagctagcttgtacagggagaccatgcagacctttgctgctgatggttatgatgaagaaagcaacctatcgtttgaggagactaaccaagagccgggttcttcatctgtagaacaaagactagatagaatagaggagaaattgtcctacataataggccttttaaacaccataatggtagcgactgctggacctaccactgctagagatgagattagagatgcccttataggcactagagaagaacttattgagatgatcaagtctgacatcttgactgtcaatgacagaatagtggccatggagaagctcagagatgaggaatgctccagagctgacactgatgatggatcagcctgttatttaacagacagagcaaggatactagataagatagtgtccagcaatgctgaagaggctaaggaagatttggatgttgatgacatcatgggcattaatttttagttaattaaaataacaacaggacaaataatggaggcctacttggtagagatgtaccatggtgtcccatatacagctgcagtacagctaaacttggttgaaaaacattcagccaacatatcactaactgtgtggataccgatgtttcaaacatctctaccaaagaactccgttatggacctgctacatgatgttacagtcatttgtacacagatatcaacagtgcatggtcccatgatcaaggtagatctgagctcttccaatgcaggtttagctaccatgccaaggcaattcttgataaatgctatcatagctttggatgactggggcaacatggattacgaagtgcctgttgcttttgataaaaagagcttctgtgtgacaattcttaagcctaaaaacatgctttacactgtacccagcattactcccactaatcgacctactcatgagctgatagctgtctgctctttccataacagggtaacattaaagtcattcaatatacctgtcttcatcagagcactgtctatcagacagcaggaccttgatagtgtggagcaggctataagctccgatgtggaccatgctataacaacagctagggtggctccctatgcagggcttacacttgtgatcaacatcacatccaccaaaggagcattcaaactgctaaaggcaggtagtcagattcttgcagaactgggtccctatctgacgcaggtgagcctacatgatgtgattatgaactggaaacatacaggcacttcctacatactcaagagctcctcaacaagtggatgaaaaagagaaagtcaccattgatcagctcaatccacaactacaaccccacgatttcacacagcacaacaaccaccgccaccaacatccacatgacaaccacacatacacacccacatacatatatacacatatcttagttaaataaaatcaggataaataatggatcctaacatgacctcacaccagatcaccctcgagatcaacatgaccagcagccgtattggcacatacactacaccagccccaacagctcttctccttgcatgtgccgtcatcaacacagtgtgtgcgctgataatggcctgcagcagtagaagcactgccacatcaggcattgtcagcagccaatgcacagttcatcccaatcaccctccaccaagttatggcgtcaatgtaactggtctgccgggtaacctatactcaaggaacactacataacattataaataacagaaattatccttcaataaaccccaggccagacagctttaccctgctagacgattcaatcagcccttgcagtatgtcgtctagttaacaaaaaaccggtaggataagtactatcctattggaaccaaacgagacctgtagagcagctcacacaagagaaccacaagctgacttcacctagtatgggaaggaacttagaagtgagtggcagcattaccaatttgaactttgagagaactcagcatcctgacacatttaggactgttgtaaaagtgaaccaaatgtgtaagcttattgcaggtgtgctcacaagtgctgctgtggcagtttgtgtgggggtcataatgtattctgttttcacatcaaaccacaaggccaactccacgcagaatgccacgacccggaacagcacatccacccctccccaaccaaccgccggtctgcccaccacagagcaagggaccatccccagattcaccaaaccccccaccaaaaccgccacccaccatgagatcacagagcccgtcaaaatggcaacaccttcagaggatccctaccaatgctccagcaatggttatttggaccgacctgatttacctgaaaatttcaaactcgtattggatgttatatgcaagcctccaggtcctgaacatcacaacaccagctgttatgagaaacgtgaaatcaacccaggaagtgtttgccctgatcttgtaacaatgaaggcaaacatgggcttaaacaatggtggtggggaggatgctgcaccttatatagaggttaccaccctttctacgtactccaacaaaagggcaatgtgtgtccacaatgggtgtgatcaaggcttctgtttcttcctttctggtttaagcactgatcaggagagagctgtgctagagcttggaggtcaacaggctatcatggagttgcattatgattcctactggaaacactattggagtaactctaattgtgttgttcccagaacaaactgcaacctgacagaccaaactgagattttgtttcctaggtttaacaacaagaatcagtctcagtgtaccacctgtgcagattcagctggcctagataacaaattttatctcacatgtgatgggcttttaagaaccctccctctagttggactacccagcctaagtcctcaggcttacaaagctgtacccacacaaactacaggcaccaccacggcaccaacatcagagacgaggcacccaacccctgcacccaggaggtccaaacctctcagtcggaagaagagagctttatgtggtgtagactcaagcagagaacccaaaccaacaatgccttactggtgtcctatgctccaattatttccaaggaggtctaattcttaagtgacctattcctgaattaacttcagaataagtaccaaccttatcagtagttaatgaaaactaagctttgatataataggacaaatatgattcctggcaggatctttctagtccttctggtgatcttcaacaccaagccaattcacccaaatacattaacagaaaaattctatgagtccacatgtagtgttgagactgcaggttataagagtgcccttagaacaggttggcatatgacagttatgtcaattaagttgtctcaaataaatattgagtcatgcaagagcagcaactcgttattggctcatgagcttgcaatctatagtagtgcagtggatgaattgagaacgttatcatccaatgccttgaagtccaaaaggaagaagaggttcctcggtttgattcttggtctcggagctgcagtcactgccggggtggctttagccaagacagtgcaacttgaaagtgagattgcattgattagagatgcagtgagaaatacaaatgaggctgttgttagcctaaccaacggcatgtcagtgttggctaaagtggtggatgatttgaaaaacttcatatctaaagaattactcccaaaaataaaccgagtctcttgtgatgtgcacgacatcactgccgtcattagattccaacagctcaacaaaagacttttggaagtatctcgtgaattttcatctaatgcaggattaacacacactgtttcatcttttatgttaacagaccgggaactcacctccattgtaggcggcatggctgtttcagcaggccaaaaagagataatgctatctagcaaagctataatgagaagaaatgggttagcaatattaagttcagtcaacgctgacacactggtttatgtaatacaactcccattatttggtgttatggacacagattgttgggtaataagaagttctatagactgtcataacatagcagacaagtatgcttgtttggctagagctgataatggctggtattgtcacaatgctggctcattatcatacttcccgtcgccaacggattgtgagatccacaatgggtatgctttctgtgacactctaaaaagtctaactgtacctgtaacatcacgagaatgcaactcaaacatgtataccactaactacgattgtaagatttccacaagtaaaacttatgtgagtacagcggtactgactacaatgggttgcttggtatcttgttatggtcataacagttgcacagtcatcaataatgacaaaggtataataaggactctgccagatggttgccactacatctccaacaaaggtgtggacagggttcaagtaggtaacactgtttactatcttagcaaagaagttggcaagtcaattgttgtcagaggggaaccattggtcttgaaatatgaccctttgagtttccctgacgataaatttgatgttgctataagagatgtggagcatagcatcaatcagacacgcacattcttgaaggcctctgatcagttattggacttaagtgaaaacagagagaataaaaatttaaacaagtcatatatactaacaactctgctcttcgttgtaatgcttattataataatggctgtcatagggttcattctgtataaggtattgaaaatgatcagagacaacaagttgaaatccaaaagtacacctggcctcacagttttatcatgacaattgtaccaaaccataattgagttagttaattaaaaacttaggataagtgacaatccagacccaacacctctttcaactctcaaggataaggtaggatgagtgtgagaccttgcaaatttgaggttcaagggttttgttccagagggaggaattgcaagtatagtcataaatattgggaatggcctttgaaaactcttatgctcaggcagaactacatgcttaataggatttataggttcctcgacaccaacacagatgcaatgtcagatgtcagcggatttgatgcaccacaaaggactgctgagtatgccttgggaaccataggtgtgctgaaaagttacctggaaaaaactaacaacatcactaaatcaatagcttgtggcagtttgatcactgtattgcagaacttggatgttggtctagtaatacaagcaagagatagcaacactgaggacaccaattacttgagaagttgcaacactatactgtcttatatagacaagatacacaagaagagacaaattattcacattctcaaaagactgccagtaggagtactatgcaatctgatccaatctgtcatctccatcgaggagaagataaattcttctatgaaaacagaatgataaggctgcctaaatactatccagccatactgcataagatgtatattattagagtaaatagaaacctcacttacgatgggtctggaccatccacaataatagatgcaggaaagtctgtggtgtggaatcgtgttgatgtgatagcttgtgtgaaagaggccttgtgctgcatagaattcagctggaataaccaagtgatcatagactttgattatagccaggccagatgatgtggactgtattcctttttttgtcagtaatcagttattaacccaaaattgttaattatgtagactttaagttaactaacttcatgttaattcaatagttatataaaaaaatattcgaattaggatcaatatggatcctattgatgaacaagaagttaatgtgtacttgccggatagctacttaaagggtgttatatcttttagtgaaactaatgctcttggcagctgtatcattggtagacctttcttgaaggatgactttactgccactacttcaatccgtaaccccctaattgaacataaaagaataagggacactaaattagtaaaaaatattgtttcaaaccctcaatataggttagtggagcctctccaaatgcagcatgagctcttgagtgtactatcgcccaatttcatattgcacactgccaacttaaggaaaattatacaaagaagtgttgacataacagataaaaagttgaaccccattttgcacattttgaatcttaattctcctaaccaagagggtaaggtgtcggaacggctaactaggctaattaagaaacatctctctcacatacctaattgggtaagcagctggtacaatatatgggtcaatcttaacaacttactgcaggagtaccgttcaaaggaagttatagaccataactgtgttctgactaggcaattgtctggaagtttcatacatgtggtcatgagtcaatatggagttgtgataattagcaaaaaaagtaaaagatatacaatgtgtacttataaccaattcctaacctggaaggaccttgccttgagcagatttaatgccaattatgtggtctggctaagtaatgtgttaaacacactcaacgaggggttgggattaaggtgtagattaaaaggtcatctgctcagtaagttgtacatttccactgacatctttttatcttcaacatctaatgaattttataatgtggtcaaggaatttgagggcttcatcatgtcactgatattgaaacaaactgaggaagccttatttagcacaaggttttataataacatgttgaacaacttaattgatgccattgatagggctcgactagagtatctggcccgctgtgccaattcagctgccaggattaatttacctagtacagatgttatgatagcatcattgggtgatatcttatctttgataaacgttttaggtgaatccaaccttaacaacttaagtgagttatattttatcttcaggatatttggtcaccctatggttgatgagaggaaggccatggatgcagtcagagataactgttgtgaaacaaagtttctgacggctaagaaccttgcatcgttaagaggagcatatgtttatagaattatcaaaggattcgtagcaaattataacaggtggccttacataaaaactagagtttgccttacaccaacatggattaactatcttgacaccaattcatgtccctcattattagagatgacagaagatgattttattgtgttagctggagtgcactttataagagaattccacatcccaaagctaactgatctggagattatattaaatgacaaggccatatctcctccaaaatcactcatttggtcatgctttccaaaaaactacatacctcaggttatacaagatgagtatgcccggaggtattgtagagctaaagcacctttgaagacaagacgtgtcttggagttctacttacaggacaaggatttcaagttggatcagctccatagagtagtagtgaaccaggactaccttaatgataaagaacatataatttctttaacaggaaaagaaagagagttgggtgttggtaggatgtttgccatgcaacctgggaagcagaggcaagtccaaattttagcagagaagctgttggctgataacatcctgcaattctttccggagacactgactagatacggtgatttggagctgcaaaagatactagagttaaaagctggactttcaaataaaaatgacagatctaaagactcctacaataattatataagtaggtgctcattaattactgatttaagtaaatttaaccaagcttttaggtacgagtcatcctgtgtgtgtagtgatcttttagatgagctacatgggactcaaagcttattctcttggctgcatttaacagtaccactgactactataatgtgtacatataggcatgcgccgccggacactggaaacaactataatgtagatgatattgctgagcagagtggactctaccgctaccacatgggcgggattgagggctggtgccagaagctctggacaacagaggccattgctttgctagatactgtagctgtgaagggccgtttccagctaacttcattaataaatggcgacaaccaaagtattgatatttcaaaaccaacaaggctggggaccaggactcaaagtgaagcagattatgatttggcaataaattctttaagattaatatcagcagcttataaaggcattggacataaattaaaagaaggtgagacctacttgtcacgtgacatgcagttcatgagtaaaacaatacaacatgaaggggtctactacccggcctccatcaagaaaatattaagagttggtccctggatcaacacaatattagatgatataaaaacttcaacagaaagtattggttctctaactcaagaactagaatataaaggtgaaagtttaatgagcagcctgctgctgaggaacttctggctctacagattatattcagtggatttaaaagatcattctttgtgtggaaagcagctctacagatccttaataaaagtgttaaaacatttgaagaggtgcttcaacctggagaaccttggggaatgtttggaattatttttaaatgtgcccatgcagtttggaggtgctgacccaaatgtcatctacaggagcttctacagaagaactccagattttctaacagaaagtataactcatctcatcctcattttaaaacattttagaagagatttggaattcaacaaagataatgtctccaaagctgttctttctttgctagagttcaccaagaatgattctgcagaatttgtaactttgatgagagatcctcaagcaattggtagtgagaggcaggccaagatcacttcagacatcaacagaacagctgtaacttcagtgttatcaaatgctccaaatgaaatatttagaacttcagctcttcattacagcagcacagaaaatgaattaaatggaatagcaagtggagtttctcctgtttatcctcatggtcttcgagttttatatgaaagtttacctttttataaagcagagaagattgtcaacatggtttctgggaccaagtccatcaccaacatactggagaagacatcagccatctcctacacagatataattcgagccaccaacatgatggtggagaacctcactttgctaacaagaataatgaaaccaggtgctgacacatctttggatcctgacacaatagtaataacaatattatcaaaaataataagagataaatcctgggatgttggtgatataattggtgtcacttccccatctcctgtctcctgcttcaaggtggtctacacatcaactctacaaaataattcagtagtaatagaaagatacacaacagacacctacacaagaggtaagagaggccccaccaagccctgggtgggcagcagcacacaggagaagaagtccatgcctgtctacaacagacaagttttaacaagaggacaaagagatcaaatagaaaatatagcaaagctggagtgggtgttttcttcagtagcaaatattgattctttgctaaatgagctcagcaccatgactttgggtctttctctaaggaaatgtagacaactttttccaacatatttaagtttaaacttcctgcacaggctttctgtcagcagcaggcccagagaatatccttcttctcttcctgcctacaggacaacaaattttcattttgatactggaccaataaataaagtgttaacagaaagatttggagatgaagatataaatttggtatttcaaaatgcaatatcatatggtctttccaccatgtctttggtggagcagtttactggtgtctgtccaaataaagttttgctggtgcccaagctacaagaaatacaactaatgaaagttccaatatttcaaggtggcttcaacctacaaagtataattccaataataaggcagcagcacatgttcctgcccaaccacatcactccagcccagtatattgaattatttctttcttcaaaacaatttcattcaagaataaatttaaaacacaacaacagatttaaacttgttttacaaaaagattattttaatggggagaacatgatagaaactttgtccacctgtttggcaggccactggatcatcattttgatgctaatgaaggagagtcaggggatatttgacaaggagtggtatgatggttttgtaacagaccacatgttcctggacctgcagctcttcctctcctccttcaagacatttctaactgtcttcaactttgcttatttaaaagttggttcaaatatagaagaaataacaggaaatcaagccaacctgctggagctgctggacctgggctactggaagaacatgtataaagtattttcagagaccaaggtgcggctggctttgctaaaacaagatttatcatttaattctgtgaagaacagcagcagcttccggcactggtttataaattctctacaagaagtacaatgtacttctgtgccttgggtggtaaatgtaacaagaaatccaactcatttaaaaggtgttctacagtacatgaagatgatagaaagtggcatgattcaaggttattcagcaaatatttcttcagttttaagtatcccatataattatccagacatggcgcacatgatgacaaaaataataagaaatcgaggccacatgtcctatgattatccaaagatgaagaaaagtttaactttctccatgacagacatgagtgacagctacatgctcaacctcttccccaaagtagaatgttcttacatgagtggttatttggataaactagatgatactctacaacttctaaagaaacctcctgttggaagaaaagttccttctgtggctttgccctggcaccactgcaacagatacaactttgtcttcagcagcacaggctgcaaagtttctgtcattgacatgcttccaaaacatttccgaagaagtaatttaaaagtaatatgttttattggagaaggggcgggcaacctcatgctaagagctgttttggaagttggtggaaatataaaattaatatatagatccttaaaagatcctgatgatcatcatgttcctgtagaatttctaagattaaaaccttgttatccttatattgatactggtggcagtttatctttggcttcaacagatgccaccaacaaggcccactgggattatttacatcttcactggacagatcctttaaatttaatagtatgtgatgcagaaataagtggtgtgaagcactggctaaaaattcttcacaggtggtatgagcacatgacttcctgcaagcactgtttaaaatcagaacatgataaatatttaataataaaatatcatgctcaagatgatttaatagatcttcctcatggtgtcaggctactaaaatgtaacatctgcctgggctccaaactaagtggcagtgagagctacctgctcattggtcttggtctttcaaataaacttcctgtctacagtgaagttcttcattcaaaacttcttttggcagaatgtcatcagtttcatcatccaaaatatttggatgtttctggaataaatacaaatataaaatccttaataccaatgttggattatccaataacttacaacaagatcaccactttgctagaaagtgtgcgggagctttcttcaaataaaaacaagaacaccatgtggattggaagaaatcctgtctaccataataaatggctaaagaggaaatatttcaacattttaaaatggctaaaatactgtatagaacttcctgccttcaggatggattataattcatttgagagaatagaaatgctttatccaaatttaagagatttggtagattctgtttctacttcagagctgaagaaagtaataaaagtaacaggcatcctcttcaggagcaacaccatgtgaattaatatgccaatgctaacatgtcatccccactactttttttgttcaatcactctcagtctagacatgtgagaagatcccaaacccaactgcacccctcccactcgaaatcagttgtagcctcagcagctccatctgccatgatctctgaccagcagcaaatgtattattattttaatttgtctatagttaacaaaaaattgatatctcacaggttgtaaacatagttcttttataattattgttagttaaactattgtgtttgacttcctttgggtatttttttcccgtgggtcggcatggcatctccacctcctcgcggtccgacctgggcatccgaaggaggacgcacgtccactcggatggctaagggagagcctgcagtagcataaccccttggggcctctaaacgggtcttgaggggttttttgctgaaaggaggaactatatacgcgtcgacgggcccgcgctcactggccgtcgttttacaacgtcgtgactgggaaaaccctggcgttacccaacttaatcgccttgcagcacatccccctttcgccagctggcgtaatagcgaagaggcccgcaccgatcgcccttcccaacagttgcgcagcctgaatggcgaatgggacgcgccctgtagcggcgcattaagcgcggcgggtgtggtggttacgcgcagcgtgaccgctacacttgccagcgccctagcgcccgctcctttcgctttcttcccttcctttctcgccacgttcgccggctttccccgtcaagctctaaatcgggggctccctttagggttccgatttagtgctttacggcacctcgaccccaaaaaacttgattagggtgatggttcacgtagtgggccatcgccctgatagacggtttttcgccctttgacgttggagtccacgttctttaatagtggactcttgttccaaactggaacaacactcaaccctatctcggtctattcttttgatttataagggattttgccgatttcggcctattggttaaaaaatgagctgatttaacaaaaatttaacgcgaattttaacaaaatattaacgcttacaatttaggtggcacttttcggggaaatgtgcgcggaacccctatttgtttatttttctaaatacattcaaatatgtatccgctcatgagacaataaccctgataaatgcttcaataatattgaaaaaggaagagtatgagtattcaacatttccgtgtcgcccttattcccttttttgcggcattttgccttcctgtttttgctcacccagaaacgctggtgaaagtaaaagatgctgaagatcagttgggtgcacgagtgggttacatcgaactggatctcaacagcggtaagatccttgagagttttcgccccgaagaacgttttccaatgatgagcacttttaaagttctgctatgtggcgcggtattatcccgtattgacgccgggcaagagcaactcggtcgccgcatacactattctcagaatgacttggttgagtactcaccagtcacagaaaagcatcttacggatggcatgacagtaagagaattatgcagtgctgccataaccatgagtgataacactgcggccaacttacttctgacaacgatcggaggaccgaaggagctaaccgcttttttgcacaacatgggggatcatgtaactcgccttgatcgttgggaaccggagctgaatgaagccataccaaacgacgagcgtgacaccacgatgcctgtagcaatggcaacaacgttgcgcaaactattaactggcgaactacttactctagcttcccggcaacaattaatagactggatggaggcggataaagttgcaggaccacttctgcgctcggcccttccggctggctggtttattgctgataaatctggagccggtgagcgtgggtctcgcggtatcattgcagcactggggccagatggtaagccctcccgtatcgtagttatctacacgacggggagtcaggcaactatggatgaacgaaatagacagatcgctgagataggtgcctcactgattaagcattggtaactgtcagaccaagtttactcatatatactttagattgatttaaaacttcatttttaatttaaaaggatctaggtgaagatcctttttgataatctcatgaccaaaatcccttaacgtgagttttcgttccactgagcgtcagaccccgtagaaaagatcaaaggatcttcttgagatcctttttttctgcgcgtaatctgctgcttgcaaacaaaaaaaccaccgctaccagcggtggtttgtttgccggatcaagagctaccaactctttttccgaaggtaactggcttcagcagagcgcagataccaaatactgtccttctagtgtagccgtagttaggccaccacttcaagaactctgtagcaccgcctacatacctcgctctgctaatcctgttaccagtggctgctgccagtggcgataagtcgtgtcttaccgggttggactcaagacgatagttaccggataaggcgcagcggtcgggctgaacggggggttcgtgcacacagcccagcttggagcgaacgacctacaccgaactgagatacctacagcgtgagctatgagaaagcgccacgcttcccgaagggagaaaggcggacaggtatccggtaagcggcagggtcggaacaggagagcgcacgagggagcttccagggggaaacgcctggtatctttatagtcctgtcgggtttcgccacctctgacttgagcgtcgatttttgtgatgctcgtcaggggggcggagcctatggaaaaacgccagcaacgcggcctttttacggttcctggccttttgctggccttttgctcacatgttctttcctgcgttatcccctgattctgtggataaccgtattaccgcctttgagtgagctgataccgctcgccgcagccgaacgaccgagcgcagcgagtcagtgagcgaggaagcggaagagcgcccaatacgcaaaccgcctctccccgcgcgttggccgattcattaatgcagctggcacgacaggtttcccgactggaaagcgggcagtgagcgcaacgcaattaatgtgagttagctcactcattaggcaccccaggctttacactttatgcttccggctcgtatgttgtgtggaattgtgagcggataacaatttcacacaggaaacagctatgaccatgattacgccaagcgcgcccgggtaatacgactcactataggg

SEQ ID NO: 7 - DNA, 18762 bp, synthetic construct
  source 1..18762: mol_type = other DNA
acgcgaaaaaatgcataacaaaactatcaacctgaaaaaagttaggacaagtgaagattgctagtcccaaagaccagaatcatgggctgtaatgtgatgatggagcttgattatggtggacgagctgcatggctggcattccacataaccaactttgataggtcagatttggaaactatcctaagaggtgctagggtgtgcaatacatggcaagatcagagactctccgtgtaccttgtgggaagggattgcaatttgttaagaccatttgtgcaagctgccaaatttatccataatactaggagaggccaaacattaacacattggttcacaaaaaatatcgtgtttagttctacagggcaagagacagagcctcccattgaccccacatgtgagctgttggtagagctgatcagtggttaagatgacagcacattatgtagttaattaaaacaaagggtaggacaagtcctaatgtccacagctatgaacaagttcactcagaccatctctaaacctgccactatcttgaatatttcagacagtgaagagtcgggcgatgaggcaggggtgggcaaggtgtcccgtaccacacagagctcagagaggtggcttgatttgctcattgaaaagttccagccgagcctacaaaacatcactagatacatcaactggaacttcatcaggatctgcaatgataggcttaaaaaagaaaaaatggggtacattgaggccaagcaatatgtggaagacatggcttggatggtgatagcatctgaggcagacagcattgagtggaagtgcataaggaggcaggagaaagtgactggggtgaaatacccaaagttcttctttgtacaacacaaagaggactggattgagtgcacaggatgcattccgtacccaggccatgacttgatctatgatgaggatgatgatgactgagctgactcagatcactccaaccagcagagagatccatagttatagaaaaacattaggataaatacacatcctaggccgccaccatgttcgtgtttctggtgctgctgcctctggtgagctcccagtgcgtgaacctgaccacaaggacccagctgccccctgcctataccaattccttcacacggggcgtgtactatcccgacaaggtgtttagatctagcgtgctgcactccacacaggatctgtttctgcctttcttttctaacgtgacctggttccacgccatccacgtgagcggcaccaatggcacaaagcggttcgacaatccagtgctgccctttaacgatggcgtgtacttcgcctccaccgagaagtctaacatcatcagaggctggatctttggcaccacactggacagcaagacacagtccctgctgatcgtgaacaatgccaccaacgtggtcatcaaggtgtgcgagttccagttttgtaatgatccattcctgggcgtgtactatcacaagaacaataagtcttggatggagagcgagtttcgcgtgtattcctctgccaacaattgcacatttgagtacgtgtcccagcccttcctgatggacctggagggcaagcagggcaatttcaagaacctgagggagttcgtgtttaagaatatcgatggctacttcaagatctactccaagcacaccccaatcaacctggtgcgcgacctgccacagggcttctctgccctggagccactggtggatctgcccatcggcatcaacatcacccggtttcagacactgctggccctgcacagaagctacctgacaccaggcgacagctcctctggatggaccgcaggagctgccgcctactatgtgggctatctgcagcccaggaccttcctgctgaagtacaacgagaatggcaccatcacagacgccgtggattgcgccctggatcccctgtctgagaccaagtgtacactgaagagctttaccgtggagaagggcatctatcagacaagcaatttcagggtgcagcctaccgagtccatcgtgcgctttcccaatatcacaaacctgtgcccttttggcgaggtgttcaacgcaacccgcttcgccagcgtgtacgcctggaataggaagcgcatctccaactgcgtggccgactattctgtgctgtacaacagcgcctccttctctacctttaagtgctatggcgtgagccccacaaagctgaatgacctgtgctttaccaacgtgtacgccgattccttcgtgatcaggggcgacgaggtgcgccagatcgcccctggccagacaggcaagatcgccgactacaattataagctgcctgacgatttcaccggctgcgtgatcgcctggaactctaacaatctggatagcaaagtgggcggcaactacaattatctgtaccggctgtttagaaagtctaatctgaagccattcgagagggacatctccacagagatctaccaggccggctctaccccctgcaatggcgtggagggctttaactgttatttccctctgcagagctacggcttccagccaacaaacggcgtgggctatcagccctaccgcgtggtggtgctgtcttttgagctgctgcacgcacctgcaacagtgtgcggaccaaagaagagcaccaatctggtgaagaacaagtgcgtgaacttcaacttcaacggactgaccggcacaggcgtgctgaccgagtccaacaagaagttcctgccttttcagcagttcggcagggacatcgcagataccacagacgccgtgcgcgaccctcagaccctggagatcctggatatcacaccatgctccttcggcggcgtgtctgtgatcacaccaggcaccaatacaagcaaccaggtggccgtgctgtatcaggacgtgaattgtaccgaggtgcccgtggcaatccacgcagatcagctgacccctacatggcgggtgtactctaccggcagcaacgtgttccagacaagagccggatgcctgatcggagccgagcacgtgaacaatagctatgagtgcgacatccctatcggcgccggcatctgtgcctcctaccagacccagacaaactccccacggagagcccggtctgtggccagccagtccatcatcgcctataccatgagcctgggcgccgagaattccgtggcctactccaacaattctatcgccatccctaccaacttcacaatctccgtgaccacagagatcctgccagtgagcatgaccaagacatccgtggactgcacaatgtatatctgtggcgattccaccgagtgctctaacctgctgctgcagtacggctctttttgtacccagctgaatagagccctgacaggcatcgccgtggagcaggacaagaacacacaggaggtgttcgcccaggtgaagcagatctacaagaccccacccatcaaggactttggcggcttcaacttcagccagatcctgcccgatcctagcaagccatccaagcggtcttttatcgaggacctgctgttcaacaaggtgaccctggccgatgccggcttcatcaagcagtatggcgattgcctgggcgacatcgccgccagagacctgatctgtgcccagaagtttaatggcctgaccgtgctgcctccactgctgacagatgagatgatcgcccagtacacatctgccctgctggccggcaccatcacaagcggatggaccttcggcgcaggagccgccctgcagatcccctttgccatgcagatggcctatcggttcaacggcatcggcgtgacccagaatgtgctgtacgagaaccagaagctgatcgccaatcagtttaactccgccatcggcaagatccaggactctctgagctccacagccagcgccctgggcaagctgcaggatgtggtgaatcagaacgcccaggccctgaataccctggtgaagcagctgtctagcaacttcggcgccatctcctctgtgctgaatgatatcctgagcaggctggacaaggtggaggcagaggtgcagatcgaccggctgatcacaggcagactgcagtccctgcagacctacgtgacacagcagctgatcagggcagcagagatcagggcctctgccaatctggccgccaccaagatgagcgagtgcgtgctgggccagtccaagagagtggacttttgtggcaagggctatcacctgatgagcttcccacagtccgcccctcacggagtggtgtttctgcacgtgacctacgtgccagcccaggagaagaacttcaccacagcaccagcaatctgccacgatggcaaggcacactttcctagggagggcgtgttcgtgagcaacggcacccactggtttgtgacacagcgcaatttctacgagccacagatcatcaccacagacaatacattcgtgtccggcaactgtgacgtggtcatcggcatcgtgaacaataccgtgtatgatcctctgcagccagagctggactcttttaaggaggagctggataagtacttcaagaatcacaccagccccgacgtggatctgggcgacatctctggcatcaatgccagcgtggtgaacatccagaaggagatcgacaggctgaacgaggtggccaagaatctgaacgagtccctgatcgatctgcaggagctgggcaagtatgagcagtacatcaagtggccctggtatatctggctgggcttcatcgccggcctgatcgccatcgtgatggtgaccatcatgctgtgctgtatgacaagctgctgttcctgcctgaagggctgctgttcttgtggcagctgctgtaagtttgatgaggacgatagcgagcctgtgctgaagggcgtgaagctgcactacacctgatagccacctatagcaagtgatgtagtatttagtctatgattagttatagaaaaacattaggataaatacacatcctaggccgggccaaaatgtctctagacagattgaagctcaatgatgtctcaaacaaggatagcctgctgtccaactgcaaatacagtgttaccagatccacaggcgatgtaaccagtgtgtctggtcatgctatgcagaaagcccttgcaaggacactcggcatgttcttacttactgccttcaaccgttgcgaagaagtggcagaaatagggctccaatatgccatgtccttgctaggcagagatgatagcatcaagatattaagagaagccggctacaatgtaaaatgtgtggacacacagctcaaggactttacaatcaaattacaaggaaaggaatacaaaatacaagtcctagatatagtgggaatagatgcagccaatttagctgatctagagatacaagccagaggagtggtagcaaaagaactcaaaacaggagccaggctacctgacaatcggaggcatgatgcaccagattgtggtgtgatagttctctgtattgcagcattagttgtttccaaattagctgcaggggacaggggaggacttgatgctgtggaaagaagggctttaaatgtgctgaaagccgagaaagccaggtaccccaacatggaggtcaagcagatagctgaaagtttttatgatctgtttgaaaggaagccttattacattgatgtcttcatcacttttggcctggcccagtctagtgtcaagggaggcagcaaagttgaggggctgttttcaggtctcttcatgaatgcatacggggcaggacaagttatgctgaggtggggtttactggcaaaatctgtcaagaacatcatgctaggccatgctagtgtacaagctgagatggaacaggtggttgaggtttacgaatatgctcagaagcaaggaggggaggcaggattctatcacatcagaaataatccaaaagcttcacttctctctttgaccaattgtcctaatttcaccagtgttgtgcttggcaatgctgcaggtttaggcatcatagggtcatataagggtgctcctaggaatagagaactctttgatgctgccaaagattatgcagaaagattaaaggacaacaatgtaattaactacagtgcattaaacttgactgcagaagaaagagagctgatcagccagcagctgaacattgttgatgacactcctgatgatgatatttaattaaaactggaaaatgtaggataaatatggagaaattcgcccccgaatttgttggcgaggatgctaacaagaaggcagaggagtttctcaaacatagatccttcccttcggaaaaaccactagctggtataccgaacactgccactcatgtcaccaaatataacatgccccctatattgcgtagctcattcaaactcccttccccgagagttgctgcaaatcttactgaaccctctgctccccctaccactccaccacccacacctccccagaacaaggaagagcagcccaaagagtctgatgttgacattgagactatgcatgtctgtaaggttcctgacaatccggaacacagcaagaagccatgctgctcagatgataccgatactaagaaaactaggaagccgatggtcacctttgtggaacccgaggagaaatttgtcggattgggagctagcttgtacagggagaccatgcagacctttgctgctgatggttatgatgaagaaagcaacctatcgtttgaggagactaaccaagagccgggttcttcatctgtagaacaaagactagatagaatagaggagaaattgtcctacataataggccttttaaacaccataatggtagcgactgctggacctaccactgctagagatgagattagagatgcccttataggcactagagaagaacttattgagatgatcaagtctgacatcttgactgtcaatgacagaatagtggccatggagaagctcagagatgaggaatgctccagagctgacactgatgatggatcagcctgttatttaacagacagagcaaggatactagataagatagtgtccagcaatgctgaagaggctaaggaagatttggatgttgatgacatcatgggcattaatttttagttaattaaaataacaacaggacaaataatggaggcctacttggtagagatgtaccatggtgtcccatatacagctgcagtacagctaaacttggttgaaaaacattcagccaacatatcactaactgtgtggataccgatgtttcaaacatctctaccaaagaactccgttatggacctgctacatgatgttacagtcatttgtacacagatatcaacagtgcatggtcccatgatcaaggtagatctgagctcttccaatgcaggtttagctaccatgccaaggcaattcttgataaatgctatcatagctttggatgactggggcaacatggattacgaagtgcctgttgcttttgataaaaagagcttctgtgtgacaattcttaagcctaaaaacatgctttacactgtacccagcattactcccactaatcgacctactcatgagctgatagctgtctgctctttccataacagggtaacattaaagtcattcaatatacctgtcttcatcagagcactgtctatcagacagcaggaccttgatagtgtggagcaggctataagctccgatgtggaccatgctataacaacagctagggtggctccctatgcagggcttacacttgtgatcaacatcacatccaccaaaggagcattcaaactgctaaaggcaggtagtcagattcttgcagaactgggtccctatctgacgcaggtgagcctacatgatgtgattatgaactggaaacatacaggcacttcctacatactcaagagctcctcaacaagtggatgaaaaagagaaagtcaccattgatcagctcaatccacaactacaaccccacgatttcacacagcacaacaaccaccgccaccaacatccacatgacaaccacacatacacacccacatacatatatacacatatcttagttaaataaaatcaggataaataatggatcctaacatgacctcacaccagatcaccctcgagatcaacatgaccagcagccgtattggcacatacactacaccagccccaacagctcttctccttgcatgtgccgtcatcaacacagtgtgtgcgctgataatggcctgcagcagtagaagcactgccacatcaggcattgtcagcagccaatgcacagttcatcccaatcaccctccaccaagttatggcgtcaatgtaactggtctgccgggtaacctatactcaaggaacactacataacattataaataacagaaattatccttcaataaaccccaggccagacagctttaccctgctagacgattcaatcagcccttgcagtatgtcgtctagttaacaaaaaaccggtaggataagtactatcctattggaaccaaacgagacctgtagagcagctcacacaagagaaccacaagctgacttcacctagtatgggaaggaacttagaagtgagtggcagcattaccaatttgaactttgagagaactcagcatcctgacacatttaggactgttgtaaaagtgaaccaaatgtgtaagcttattgcaggtgtgctcacaagtgctgctgtggcagtttgtgtgggggtcataatgtattctgttttcacatcaaaccacaaggccaactccacgcagaatgccacgacccggaacagcacatccacccctccccaaccaaccgccggtctgcccaccacagagcaagggaccatccccagattcaccaaaccccccaccaaaaccgccacccaccatgagatcacagagcccgtcaaaatggcaacaccttcagaggatccctaccaatgctccagcaatggttatttggaccgacctgatttacctgaaaatttcaaactcgtattggatgttatatgcaagcctccaggtcctgaacatcacaacaccagctgttatgagaaacgtgaaatcaacccaggaagtgtttgccctgatcttgtaacaatgaaggcaaacatgggcttaaacaatggtggtggggaggatgctgcaccttatatagaggttaccaccctttctacgtactccaacaaaagggcaatgtgtgtccacaatgggtgtgatcaaggcttctgtttcttcctttctggtttaagcactgatcaggagagagctgtgctagagcttggaggtcaacaggctatcatggagttgcattatgattcctactggaaacactattggagtaactctaattgtgttgttcccagaacaaactgcaacctgacagaccaaactgagattttgtttcctaggtttaacaacaagaatcagtctcagtgtaccacctgtgcagattcagctggcctagataacaaattttatctcacatgtgatgggcttttaagaaccctccctctagttggactacccagcctaagtcctcaggcttacaaagctgtacccacacaaactacaggcaccaccacggcaccaacatcagagacgaggcacccaacccctgcacccaggaggtccaaacctctcagtcggaagaagagagctttatgtggtgtagactcaagcagagaacccaaaccaacaatgccttactggtgtcctatgctccaattatttccaaggaggtctaattcttaagtgacctattcctgaattaacttcagaataagtaccaaccttatcagtagttaatgaaaactaagctttgatataataggacaaatatgattcctggcaggatctttctagtccttctggtgatcttcaacaccaagccaattcacccaaatacattaacagaaaaattctatgagtccacatgtagtgttgagactgcaggttataagagtgcccttagaacaggttggcatatgacagttatgtcaattaagttgtctcaaataaatattgagtcatgcaagagcagcaactcgttattggctcatgagcttgcaatctatagtagtgcagtggatgaattgagaacgttatcatccaatgccttgaagtccaaaaggaagaagaggttcctcggtttgattcttggtctcggagctgcagtcactgccggggtggctttagccaagacagtgcaacttgaaagtgagattgcattgattagagatgcagtgagaaatacaaatgaggctgttgttagcctaaccaacggcatgtcagtgttggctaaagtggtggatgatttgaaaaacttcatatctaaagaattactcccaaaaataaaccgagtctcttgtgatgtgcacgacatcactgccgtcattagattccaacagctcaacaaaagacttttggaagtatctcgtgaattttcatctaatgcaggattaacacacactgtttcatcttttatgttaacagaccgggaactcacctccattgtaggcggcatggctgtttcagcaggccaaaaagagataatgctatctagcaaagctataatgagaagaaatgggttagcaatattaagttcagtcaacgctgacacactggtttatgtaatacaactcccattatttggtgttatggacacagattgttgggtaataagaagttctatagactgtcataacatagcagacaagtatgcttgtttggctagagctgataatggctggtattgtcacaatgctggctcattatcatacttcccgtcgccaacggattgtgagatccacaatgggtatgctttctgtgacactctaaaaagtctaactgtacctgtaacatcacgagaatgcaactcaaacatgtataccactaactacgattgtaagatttccacaagtaaaacttatgtgagtacagcggtactgactacaatgggttgcttggtatcttgttatggtcataacagttgcacagtcatcaataatgacaaaggtataataaggactctgccagatggttgccactacatctccaacaaaggtgtggacagggttcaagtaggtaacactgtttactatcttagcaaagaagttggcaagtcaattgttgtcagaggggaaccattggtcttgaaatatgaccctttgagtttccctgacgataaatttgatgttgctataagagatgtggagcatagcatcaatcagacacgcacattcttgaaggcctctgatcagttattggacttaagtgaaaacagagagaataaaaatttaaacaagtcatatatactaacaactctgctcttcgttgtaatgcttattataataatggctgtcatagggttcattctgtataaggtattgaaaatgatcagagacaacaagttgaaatccaaaagtacacctggcctcacagttttatcatgacaattgtaccaaaccataattgagttagttaattaaaaacttaggataagtgacaatccagacccaacacctctttcaactctcaaggataaggtaggatgagtgtgagaccttgcaaatttgaggttcaagggttttgttccagagggaggaattgcaagtatagtcataaatattgggaatggcctttgaaaactcttatgctcaggcagaactacatgcttaataggatttataggttcctcgacaccaacacagatgcaatgtcagatgtcagcggatttgatgcaccacaaaggactgctgagtatgccttgggaaccataggtgtgctgaaaagttacctggaaaaaactaacaacatcactaaatcaatagcttgtggcagtttgatcactgtattgcagaacttggatgttggtctagtaatacaagcaagagatagcaacactgaggacaccaattacttgagaagttgcaacactatactgtcttatatagacaagatacacaagaagagacaaattattcacattctcaaaagactgccagtaggagtactatgcaatctgatccaatctgtcatctccatcgaggagaagataaattcttctatgaaaacagaatgataaggctgcctaaatactatccagccatactgcataagatgtatattattagagtaaatagaaacctcacttacgatgggtctggaccatccacaataatagatgcaggaaagtctgtggtgtggaatcgtgttgatgtgatagcttgtgtgaaagaggccttgtgctgcatagaattcagctggaataaccaagtgatcatagactttgattatagccaggccagatgatgtggactgtattcctttttttgtcagtaatcagttattaacccaaaattgttaattatgtagactttaagttaactaacttcatgttaattcaatagttatataaaaaaatattcgaattaggatcaatatggatcctattgatgaacaagaagttaatgtgtacttgccggatagctacttaaagggtgttatatcttttagtgaaactaatgctcttggcagctgtatcattggtagacctttcttgaaggatgactttactgccactacttcaatccgtaaccccctaattgaacataaaagaataagggacactaaattagtaaaaaatattgtttcaaaccctcaatataggttagtggagcctctccaaatgcagcatgagctcttgagtgtactatcgcccaatttcatattgcacactgccaacttaaggaaaattatacaaagaagtgttgacataacagataaaaagttgaaccccattttgcacattttgaatcttaattctcctaaccaagagggtaaggtgtcggaacggctaactaggctaattaagaaacatctctctcacatacctaattgggtaagcagctggtacaatatatgggtcaatcttaacaacttactgcaggagtaccgttcaaaggaagttatagaccataactgtgttctgactaggcaattgtctggaagtttcatacatgtggtcatgagtcaatatggagttgtgataattagcaaaaaaagtaaaagatatacaatgtgtacttataaccaattcctaacctggaaggaccttgccttgagcagatttaatgccaattatgtggtctggctaagtaatgtgttaaacacactcaacgaggggttgggattaaggtgtagattaaaaggtcatctgctcagtaagttgtacatttccactgacatctttttatcttcaacatctaatgaattttataatgtggtcaaggaatttgagggcttcatcatgtcactgatattgaaacaaactgaggaagccttatttagcacaaggttttataataacatgttgaacaacttaattgatgccattgatagggctcgactagagtatctggcccgctgtgccaattcagctgccaggattaatttacctagtacagatgttatgatagcatcattgggtgatatcttatctttgataaacgttttaggtgaatccaaccttaacaacttaagtgagttatattttatcttcaggatatttggtcaccctatggttgatgagaggaaggccatggatgcagtcagagataactgttgtgaaacaaagtttctgacggctaagaaccttgcatcgttaagaggagcatatgtttatagaattatcaaaggattcgtagcaaattataacaggtggccttacataaaaactagagtttgccttacaccaacatggattaactatcttgacaccaattcatgtccctcattattagagatgacagaagatgattttattgtgttagctggagtgcactttataagagaattccacatcccaaagctaactgatctggagattatattaaatgacaaggccatatctcctccaaaatcactcatttggtcatgctttccaaaaaactacatacctcaggttatacaagatgagtatgcccggaggtattgtagagctaaagcacctttgaagacaagacgtgtcttggagttctacttacaggacaaggatttcaagttggatcagctccatagagtagtagtgaaccaggactaccttaatgataaagaacatataatttctttaacaggaaaagaaagagagttgggtgttggtaggatgtttgccatgcaacctgggaagcagaggcaagtccaaattttagcagagaagctgttggctgataacatcctgcaattctttccggagacactgactagatacggtgatttggagctgcaaaagatactagagttaaaagctggactttcaaataaaaatgacagatctaaagactcctacaataattatataagtaggtgctcattaattactgatttaagtaaatttaaccaagcttttaggtacgagtcatcctgtgtgtgtagtgatcttttagatgagctacatgggactcaaagcttattctcttggctgcatttaacagtaccactgactactataatgtgtacatataggcatgcgccgccggacactggaaacaactataatgtagatgatattgctgagcagagtggactctaccgctaccacatgggcgggattgagggctggtgccagaagctctggacaacagaggccattgctttgctagatactgtagctgtgaagggccgtttccagctaacttcattaataaatggcgacaaccaaagtattgatatttcaaaaccaacaaggctggggaccaggactcaaagtgaagcagattatgatttggcaataaattctttaagattaatatcagcagcttataaaggcattggacataaattaaaagaaggtgagacctacttgtcacgtgacatgcagttcatgagtaaaacaatacaacatgaaggggtctactacccggcctccatcaagaaaatattaagagttggtccctggatcaacacaatattagatgatataaaaacttcaacagaaagtattggttctctaactcaagaactagaatataaaggtgaaagtttaatgagcagcctgctgctgaggaacttctggctctacagattatattcagtggatttaaaagatcattctttgtgtggaaagcagctctacagatccttaataaaagtgttaaaacatttgaagaggtgcttcaacctggagaaccttggggaatgtttggaattatttttaaatgtgcccatgcagtttggaggtgctgacccaaatgtcatctacaggagcttctacagaagaactccagattttctaacagaaagtataactcatctcatcctcattttaaaacattttagaagagatttggaattcaacaaagataatgtctccaaagctgttctttctttgctagagttcaccaagaatgattctgcagaatttgtaactttgatgagagatcctcaagcaattggtagtgagaggcaggccaagatcacttcagacatcaacagaacagctgtaacttcagtgttatcaaatgctccaaatgaaatatttagaacttcagctcttcattacagcagcacagaaaatgaattaaatggaatagcaagtggagtttctcctgtttatcctcatggtcttcgagttttatatgaaagtttacctttttataaagcagagaagattgtcaacatggtttctgggaccaagtccatcaccaacatactggagaagacatcagccatctcctacacagatataattcgagccaccaacatgatggtggagaacctcactttgctaacaagaataatgaaaccaggtgctgacacatctttggatcctgacacaatagtaataacaatattatcaaaaataataagagataaatcctgggatgttggtgatataattggtgtcacttccccatctcctgtctcctgcttcaaggtggtctacacatcaactctacaaaataattcagtagtaatagaaagatacacaacagacacctacacaagaggtaagagaggccccaccaagccctgggtgggcagcagcacacaggagaagaagtccatgcctgtctacaacagacaagttttaacaagaggacaaagagatcaaatagaaaatatagcaaagctggagtgggtgttttcttcagtagcaaatattgattctttgctaaatgagctcagcaccatgactttgggtctttctctaaggaaatgtagacaactttttccaacatatttaagtttaaacttcctgcacaggctttctgtcagcagcaggcccagagaatatccttcttctcttcctgcctacaggacaacaaattttcattttgatactggaccaataaataaagtgttaacagaaagatttggagatgaagatataaatttggtatttcaaaatgcaatatcatatggtctttccaccatgtctttggtggagcagtttactggtgtctgtccaaataaagttttgctggtgcccaagctacaagaaatacaactaatgaaagttccaatatttcaaggtggcttcaacctacaaagtataattccaataataaggcagcagcacatgttcctgcccaaccacatcactccagcccagtatattgaattatttctttcttcaaaacaatttcattcaagaataaatttaaaacacaacaacagatttaaacttgttttacaaaaagattattttaatggggagaacatgatagaaactttgtccacctgtttggcaggccactggatcatcattttgatgctaatgaaggagagtcaggggatatttgacaaggagtggtatgatggttttgtaacagaccacatgttcctggacctgcagctcttcctctcctccttcaagacatttctaactgtcttcaactttgcttatttaaaagttggttcaaatatagaagaaataacaggaaatcaagccaacctgctggagctgctggacctgggctactggaagaacatgtataaagtattttcagagaccaaggtgcggctggctttgctaaaacaagatttatcatttaattctgtgaagaacagcagcagcttccggcactggtttataaattctctacaagaagtacaatgtacttctgtgccttgggtggtaaatgtaacaagaaatccaactcatttaaaaggtgttctacagtacatgaagatgatagaaagtggcatgattcaaggttattcagcaaatatttcttcagttttaagtatcccatataattatccagacatggcgcacatgatgacaaaaataataagaaatcgaggccacatgtcctatgattatccaaagatgaagaaaagtttaactttctccatgacagacatgagtgacagctacatgctcaacctcttccccaaagtagaatgttcttacatgagtggttatttggataaactagatgatactctacaacttctaaagaaacctcctgttggaagaaaagttccttctgtggctttgccctggcaccactgcaacagatacaactttgtcttcagcagcacaggctgcaaagtttctgtcattgacatgcttccaaaacatttccgaagaagtaatttaaaagtaatatgttttattggagaaggggcgggcaacctcatgctaagagctgttttggaagttggtggaaatataaaattaatatatagatccttaaaagatcctgatgatcatcatgttcctgtagaatttctaagattaaaaccttgttatccttatattgatactggtggcagtttatctttggcttcaacagatgccaccaacaaggcccactgggattatttacatcttcactggacagatcctttaaatttaatagtatgtgatgcagaaataagtggtgtgaagcactggctaaaaattcttcacaggtggtatgagcacatgacttcctgcaagcactgtttaaaatcagaacatgataaatatttaataataaaatatcatgctcaagatgatttaatagatcttcctcatggtgtcaggctactaaaatgtaacatctgcctgggctccaaactaagtggcagtgagagctacctgctcattggtcttggtctttcaaataaacttcctgtctacagtgaagttcttcattcaaaacttcttttggcagaatgtcatcagtttcatcatccaaaatatttggatgtttctggaataaatacaaatataaaatccttaataccaatgttggattatccaataacttacaacaagatcaccactttgctagaaagtgtgcgggagctttcttcaaataaaaacaagaacaccatgtggattggaagaaatcctgtctaccataataaatggctaaagaggaaatatttcaacattttaaaatggctaaaatactgtatagaacttcctgccttcaggatggattataattcatttgagagaatagaaatgctttatccaaatttaagagatttggtagattctgtttctacttcagagctgaagaaagtaataaaagtaacaggcatcctcttcaggagcaacaccatgtgaattaatatgccaatgctaacatgtcatccccactactttttttgttcaatcactctcagtctagacatgtgagaagatcccaaacccaactgcacccctcccactcgaaatcagttgtagcctcagcagctccatctgccatgatctctgaccagcagcaaatgtattattattttaatttgtctatagttaacaaaaaattgatatctcacaggttgtaaacatagttcttttataattattgttagttaaactattgtgtttgacttcctttgggtatttttttcccgt

SEQ ID NO: 8 - DNA, 21754 bp, synthetic construct
  source 1..21754: mol_type = other DNA
acgcgaaaaaatgcataacaaaactatcaacctgaaaaaagttaggacaagtgaagattgctagtcccaaagaccagaatcatgggctgtaatgtgatgatggagcttgattatggtggacgagctgcatggctggcattccacataaccaactttgataggtcagatttggaaactatcctaagaggtgctagggtgtgcaatacatggcaagatcagagactctccgtgtaccttgtgggaagggattgcaatttgttaagaccatttgtgcaagctgccaaatttatccataatactaggagaggccaaacattaacacattggttcacaaaaaatatcgtgtttagttctacagggcaagagacagagcctcccattgaccccacatgtgagctgttggtagagctgatcagtggttaagatgacagcacattatgtagttaattaaaacaaagggtaggacaagtcctaatgtccacagctatgaacaagttcactcagaccatctctaaacctgccactatcttgaatatttcagacagtgaagagtcgggcgatgaggcaggggtgggcaaggtgtcccgtaccacacagagctcagagaggtggcttgatttgctcattgaaaagttccagccgagcctacaaaacatcactagatacatcaactggaacttcatcaggatctgcaatgataggcttaaaaaagaaaaaatggggtacattgaggccaagcaatatgtggaagacatggcttggatggtgatagcatctgaggcagacagcattgagtggaagtgcataaggaggcaggagaaagtgactggggtgaaatacccaaagttcttctttgtacaacacaaagaggactggattgagtgcacaggatgcattccgtacccaggccatgacttgatctatgatgaggatgatgatgactgagctgactcagatcactccaaccagcagagagatccatagttatagaaaaacattaggataaatacacatcctaggccgccaccatgttcgtgtttctggtgctgctgcctctggtgagctcccagtgcgtgaacctgaccacaaggacccagctgccccctgcctataccaattccttcacacggggcgtgtactatcccgacaaggtgtttagatctagcgtgctgcactccacacaggatctgtttctgcctttcttttctaacgtgacctggttccacgccatccacgtgagcggcaccaatggcacaaagcggttcgacaatccagtgctgccctttaacgatggcgtgtacttcgcctccaccgagaagtctaacatcatcagaggctggatctttggcaccacactggacagcaagacacagtccctgctgatcgtgaacaatgccaccaacgtggtcatcaaggtgtgcgagttccagttttgtaatgatccattcctgggcgtgtactatcacaagaacaataagtcttggatggagagcgagtttcgcgtgtattcctctgccaacaattgcacatttgagtacgtgtcccagcccttcctgatggacctggagggcaagcagggcaatttcaagaacctgagggagttcgtgtttaagaatatcgatggctacttcaagatctactccaagcacaccccaatcaacctggtgcgcgacctgccacagggcttctctgccctggagccactggtggatctgcccatcggcatcaacatcacccggtttcagacactgctggccctgcacagaagctacctgacaccaggcgacagctcctctggatggaccgcaggagctgccgcctactatgtgggctatctgcagcccaggaccttcctgctgaagtacaacgagaatggcaccatcacagacgccgtggattgcgccctggatcccctgtctgagaccaagtgtacactgaagagctttaccgtggagaagggcatctatcagacaagcaatttcagggtgcagcctaccgagtccatcgtgcgctttcccaatatcacaaacctgtgcccttttggcgaggtgttcaacgcaacccgcttcgccagcgtgtacgcctggaataggaagcgcatctccaactgcgtggccgactattctgtgctgtacaacagcgcctccttctctacctttaagtgctatggcgtgagccccacaaagctgaatgacctgtgctttaccaacgtgtacgccgattccttcgtgatcaggggcgacgaggtgcgccagatcgcccctggccagacaggcaagatcgccgactacaattataagctgcctgacgatttcaccggctgcgtgatcgcctggaactctaacaatctggatagcaaagtgggcggcaactacaattatctgtaccggctgtttagaaagtctaatctgaagccattcgagagggacatctccacagagatctaccaggccggctctaccccctgcaatggcgtggagggctttaactgttatttccctctgcagagctacggcttccagccaacaaacggcgtgggctatcagccctaccgcgtggtggtgctgtcttttgagctgctgcacgcacctgcaacagtgtgcggaccaaagaagagcaccaatctggtgaagaacaagtgcgtgaacttcaacttcaacggactgaccggcacaggcgtgctgaccgagtccaacaagaagttcctgccttttcagcagttcggcagggacatcgcagataccacagacgccgtgcgcgaccctcagaccctggagatcctggatatcacaccatgctccttcggcggcgtgtctgtgatcacaccaggcaccaatacaagcaaccaggtggccgtgctgtatcaggacgtgaattgtaccgaggtgcccgtggcaatccacgcagatcagctgacccctacatggcgggtgtactctaccggcagcaacgtgttccagacaagagccggatgcctgatcggagccgagcacgtgaacaatagctatgagtgcgacatccctatcggcgccggcatctgtgcctcctaccagacccagacaaactccccacggagagcccggtctgtggccagccagtccatcatcgcctataccatgagcctgggcgccgagaattccgtggcctactccaacaattctatcgccatccctaccaacttcacaatctccgtgaccacagagatcctgccagtgagcatgaccaagacatccgtggactgcacaatgtatatctgtggcgattccaccgagtgctctaacctgctgctgcagtacggctctttttgtacccagctgaatagagccctgacaggcatcgccgtggagcaggacaagaacacacaggaggtgttcgcccaggtgaagcagatctacaagaccccacccatcaaggactttggcggcttcaacttcagccagatcctgcccgatcctagcaagccatccaagcggtcttttatcgaggacctgctgttcaacaaggtgaccctggccgatgccggcttcatcaagcagtatggcgattgcctgggcgacatcgccgccagagacctgatctgtgcccagaagtttaatggcctgaccgtgctgcctccactgctgacagatgagatgatcgcccagtacacatctgccctgctggccggcaccatcacaagcggatggaccttcggcgcaggagccgccctgcagatcccctttgccatgcagatggcctatcggttcaacggcatcggcgtgacccagaatgtgctgtacgagaaccagaagctgatcgccaatcagtttaactccgccatcggcaagatccaggactctctgagctccacagccagcgccctgggcaagctgcaggatgtggtgaatcagaacgcccaggccctgaataccctggtgaagcagctgtctagcaacttcggcgccatctcctctgtgctgaatgatatcctgagcaggctggacaaggtggaggcagaggtgcagatcgaccggctgatcacaggcagactgcagtccctgcagacctacgtgacacagcagctgatcagggcagcagagatcagggcctctgccaatctggccgccaccaagatgagcgagtgcgtgctgggccagtccaagagagtggacttttgtggcaagggctatcacctgatgagcttcccacagtccgcccctcacggagtggtgtttctgcacgtgacctacgtgccagcccaggagaagaacttcaccacagcaccagcaatctgccacgatggcaaggcacactttcctagggagggcgtgttcgtgagcaacggcacccactggtttgtgacacagcgcaatttctacgagccacagatcatcaccacagacaatacattcgtgtccggcaactgtgacgtggtcatcggcatcgtgaacaataccgtgtatgatcctctgcagccagagctggactcttttaaggaggagctggataagtacttcaagaatcacaccagccccgacgtggatctgggcgacatctctggcatcaatgccagcgtggtgaacatccagaaggagatcgacaggctgaacgaggtggccaagaatctgaacgagtccctgatcgatctgcaggagctgggcaagtatgagcagtacatcaagtggccctggtatatctggctgggcttcatcgccggcctgatcgccatcgtgatggtgaccatcatgctgtgctgtatgacaagctgctgttcctgcctgaagggctgctgttcttgtggcagctgctgtaagtttgatgaggacgatagcgagcctgtgctgaagggcgtgaagctgcactacacctgatagccacctatagcaagtgatgtagtatttagtctatgattagttatagaaaaacattaggataaatacacatcctaggccgggccaaaatgtctctagacagattgaagctcaatgatgtctcaaacaaggatagcctgctgtccaactgcaaatacagtgttaccagatccacaggcgatgtaaccagtgtgtctggtcatgctatgcagaaagcccttgcaaggacactcggcatgttcttacttactgccttcaaccgttgcgaagaagtggcagaaatagggctccaatatgccatgtccttgctaggcagagatgatagcatcaagatattaagagaagccggctacaatgtaaaatgtgtggacacacagctcaaggactttacaatcaaattacaaggaaaggaatacaaaatacaagtcctagatatagtgggaatagatgcagccaatttagctgatctagagatacaagccagaggagtggtagcaaaagaactcaaaacaggagccaggctacctgacaatcggaggcatgatgcaccagattgtggtgtgatagttctctgtattgcagcattagttgtttccaaattagctgcaggggacaggggaggacttgatgctgtggaaagaagggctttaaatgtgctgaaagccgagaaagccaggtaccccaacatggaggtcaagcagatagctgaaagtttttatgatctgtttgaaaggaagccttattacattgatgtcttcatcacttttggcctggcccagtctagtgtcaagggaggcagcaaagttgaggggctgttttcaggtctcttcatgaatgcatacggggcaggacaagttatgctgaggtggggtttactggcaaaatctgtcaagaacatcatgctaggccatgctagtgtacaagctgagatggaacaggtggttgaggtttacgaatatgctcagaagcaaggaggggaggcaggattctatcacatcagaaataatccaaaagcttcacttctctctttgaccaattgtcctaatttcaccagtgttgtgcttggcaatgctgcaggtttaggcatcatagggtcatataagggtgctcctaggaatagagaactctttgatgctgccaaagattatgcagaaagattaaaggacaacaatgtaattaactacagtgcattaaacttgactgcagaagaaagagagctgatcagccagcagctgaacattgttgatgacactcctgatgatgatatttaattaaaactggaaaatgtaggataaatatggagaaattcgcccccgaatttgttggcgaggatgctaacaagaaggcagaggagtttctcaaacatagatccttcccttcggaaaaaccactagctggtataccgaacactgccactcatgtcaccaaatataacatgccccctatattgcgtagctcattcaaactcccttccccgagagttgctgcaaatcttactgaaccctctgctccccctaccactccaccacccacacctccccagaacaaggaagagcagcccaaagagtctgatgttgacattgagactatgcatgtctgtaaggttcctgacaatccggaacacagcaagaagccatgctgctcagatgataccgatactaagaaaactaggaagccgatggtcacctttgtggaacccgaggagaaatttgtcggattgggagctagcttgtacagggagaccatgcagacctttgctgctgatggttatgatgaagaaagcaacctatcgtttgaggagactaaccaagagccgggttcttcatctgtagaacaaagactagatagaatagaggagaaattgtcctacataataggccttttaaacaccataatggtagcgactgctggacctaccactgctagagatgagattagagatgcccttataggcactagagaagaacttattgagatgatcaagtctgacatcttgactgtcaatgacagaatagtggccatggagaagctcagagatgaggaatgctccagagctgacactgatgatggatcagcctgttatttaacagacagagcaaggatactagataagatagtgtccagcaatgctgaagaggctaaggaagatttggatgttgatgacatcatgggcattaatttttagttaattaaaataacaacaggacaaataatggaggcctacttggtagagatgtaccatggtgtcccatatacagctgcagtacagctaaacttggttgaaaaacattcagccaacatatcactaactgtgtggataccgatgtttcaaacatctctaccaaagaactccgttatggacctgctacatgatgttacagtcatttgtacacagatatcaacagtgcatggtcccatgatcaaggtagatctgagctcttccaatgcaggtttagctaccatgccaaggcaattcttgataaatgctatcatagctttggatgactggggcaacatggattacgaagtgcctgttgcttttgataaaaagagcttctgtgtgacaattcttaagcctaaaaacatgctttacactgtacccagcattactcccactaatcgacctactcatgagctgatagctgtctgctctttccataacagggtaacattaaagtcattcaatatacctgtcttcatcagagcactgtctatcagacagcaggaccttgatagtgtggagcaggctataagctccgatgtggaccatgctataacaacagctagggtggctccctatgcagggcttacacttgtgatcaacatcacatccaccaaaggagcattcaaactgctaaaggcaggtagtcagattcttgcagaactgggtccctatctgacgcaggtgagcctacatgatgtgattatgaactggaaacatacaggcacttcctacatactcaagagctcctcaacaagtggatgaaaaagagaaagtcaccattgatcagctcaatccacaactacaaccccacgatttcacacagcacaacaaccaccgccaccaacatccacatgacaaccacacatacacacccacatacatatatacacatatcttagttaaataaaatcaggataaataatggatcctaacatgacctcacaccagatcaccctcgagatcaacatgaccagcagccgtattggcacatacactacaccagccccaacagctcttctccttgcatgtgccgtcatcaacacagtgtgtgcgctgataatggcctgcagcagtagaagcactgccacatcaggcattgtcagcagccaatgcacagttcatcccaatcaccctccaccaagttatggcgtcaatgtaactggtctgccgggtaacctatactcaaggaacactacataacattataaataacagaaattatccttcaataaaccccaggccagacagctttaccctgctagacgattcaatcagcccttgcagtatgtcgtctagttaacaaaaaaccggtaggataagtactatcctattggaaccaaacgagacctgtagagcagctcacacaagagaaccacaagctgacttcacctagtatgggaaggaacttagaagtgagtggcagcattaccaatttgaactttgagagaactcagcatcctgacacatttaggactgttgtaaaagtgaaccaaatgtgtaagcttattgcaggtgtgctcacaagtgctgctgtggcagtttgtgtgggggtcataatgtattctgttttcacatcaaaccacaaggccaactccacgcagaatgccacgacccggaacagcacatccacccctccccaaccaaccgccggtctgcccaccacagagcaagggaccatccccagattcaccaaaccccccaccaaaaccgccacccaccatgagatcacagagcccgtcaaaatggcaacaccttcagaggatccctaccaatgctccagcaatggttatttggaccgacctgatttacctgaaaatttcaaactcgtattggatgttatatgcaagcctccaggtcctgaacatcacaacaccagctgttatgagaaacgtgaaatcaacccaggaagtgtttgccctgatcttgtaacaatgaaggcaaacatgggcttaaacaatggtggtggggaggatgctgcaccttatatagaggttaccaccctttctacgtactccaacaaaagggcaatgtgtgtccacaatgggtgtgatcaaggcttctgtttcttcctttctggtttaagcactgatcaggagagagctgtgctagagcttggaggtcaacaggctatcatggagttgcattatgattcctactggaaacactattggagtaactctaattgtgttgttcccagaacaaactgcaacctgacagaccaaactgagattttgtttcctaggtttaacaacaagaatcagtctcagtgtaccacctgtgcagattcagctggcctagataacaaattttatctcacatgtgatgggcttttaagaaccctccctctagttggactacccagcctaagtcctcaggcttacaaagctgtacccacacaaactacaggcaccaccacggcaccaacatcagagacgaggcacccaacccctgcacccaggaggtccaaacctctcagtcggaagaagagagctttatgtggtgtagactcaagcagagaacccaaaccaacaatgccttactggtgtcctatgctccaattatttccaaggaggtctaattcttaagtgacctattcctgaattaacttcagaataagtaccaaccttatcagtagttaatgaaaactaagctttgatataataggacaaatatgattcctggcaggatctttctagtccttctggtgatcttcaacaccaagccaattcacccaaatacattaacagaaaaattctatgagtccacatgtagtgttgagactgcaggttataagagtgcccttagaacaggttggcatatgacagttatgtcaattaagttgtctcaaataaatattgagtcatgcaagagcagcaactcgttattggctcatgagcttgcaatctatagtagtgcagtggatgaattgagaacgttatcatccaatgccttgaagtccaaaaggaagaagaggttcctcggtttgattcttggtctcggagctgcagtcactgccggggtggctttagccaagacagtgcaacttgaaagtgagattgcattgattagagatgcagtgagaaatacaaatgaggctgttgttagcctaaccaacggcatgtcagtgttggctaaagtggtggatgatttgaaaaacttcatatctaaagaattactcccaaaaataaaccgagtctcttgtgatgtgcacgacatcactgccgtcattagattccaacagctcaacaaaagacttttggaagtatctcgtgaattttcatctaatgcaggattaacacacactgtttcatcttttatgttaacagaccgggaactcacctccattgtaggcggcatggctgtttcagcaggccaaaaagagataatgctatctagcaaagctataatgagaagaaatgggttagcaatattaagttcagtcaacgctgacacactggtttatgtaatacaactcccattatttggtgttatggacacagattgttgggtaataagaagttctatagactgtcataacatagcagacaagtatgcttgtttggctagagctgataatggctggtattgtcacaatgctggctcattatcatacttcccgtcgccaacggattgtgagatccacaatgggtatgctttctgtgacactctaaaaagtctaactgtacctgtaacatcacgagaatgcaactcaaacatgtataccactaactacgattgtaagatttccacaagtaaaacttatgtgagtacagcggtactgactacaatgggttgcttggtatcttgttatggtcataacagttgcacagtcatcaataatgacaaaggtataataaggactctgccagatggttgccactacatctccaacaaaggtgtggacagggttcaagtaggtaacactgtttactatcttagcaaagaagttggcaagtcaattgttgtcagaggggaaccattggtcttgaaatatgaccctttgagtttccctgacgataaatttgatgttgctataagagatgtggagcatagcatcaatcagacacgcacattcttgaaggcctctgatcagttattggacttaagtgaaaacagagagaataaaaatttaaacaagtcatatatactaacaactctgctcttcgttgtaatgcttattataataatggctgtcatagggttcattctgtataaggtattgaaaatgatcagagacaacaagttgaaatccaaaagtacacctggcctcacagttttatcatgacaattgtaccaaaccataattgagttagttaattaaaaacttaggataagtgacaatccagacccaacacctctttcaactctcaaggataaggtaggatgagtgtgagaccttgcaaatttgaggttcaagggttttgttccagagggaggaattgcaagtatagtcataaatattgggaatggcctttgaaaactcttatgctcaggcagaactacatgcttaataggatttataggttcctcgacaccaacacagatgcaatgtcagatgtcagcggatttgatgcaccacaaaggactgctgagtatgccttgggaaccataggtgtgctgaaaagttacctggaaaaaactaacaacatcactaaatcaatagcttgtggcagtttgatcactgtattgcagaacttggatgttggtctagtaatacaagcaagagatagcaacactgaggacaccaattacttgagaagttgcaacactatactgtcttatatagacaagatacacaagaagagacaaattattcacattctcaaaagactgccagtaggagtactatgcaatctgatccaatctgtcatctccatcgaggagaagataaattcttctatgaaaacagaatgataaggctgcctaaatactatccagccatactgcataagatgtatattattagagtaaatagaaacctcacttacgatgggtctggaccatccacaataatagatgcaggaaagtctgtggtgtggaatcgtgttgatgtgatagcttgtgtgaaagaggccttgtgctgcatagaattcagctggaataaccaagtgatcatagactttgattatagccaggccagatgatgtggactgtattcctttttttgtcagtaatcagttattaacccaaaattgttaattatgtagactttaagttaactaacttcatgttaattcaatagttatataaaaaaatattcgaattaggatcaatatggatcctattgatgaacaagaagttaatgtgtacttgccggatagctacttaaagggtgttatatcttttagtgaaactaatgctcttggcagctgtatcattggtagacctttcttgaaggatgactttactgccactacttcaatccgtaaccccctaattgaacataaaagaataagggacactaaattagtaaaaaatattgtttcaaaccctcaatataggttagtggagcctctccaaatgcagcatgagctcttgagtgtactatcgcccaatttcatattgcacactgccaacttaaggaaaattatacaaagaagtgttgacataacagataaaaagttgaaccccattttgcacattttgaatcttaattctcctaaccaagagggtaaggtgtcggaacggctaactaggctaattaagaaacatctctctcacatacctaattgggtaagcagctggtacaatatatgggtcaatcttaacaacttactgcaggagtaccgttcaaaggaagttatagaccataactgtgttctgactaggcaattgtctggaagtttcatacatgtggtcatgagtcaatatggagttgtgataattagcaaaaaaagtaaaagatatacaatgtgtacttataaccaattcctaacctggaaggaccttgccttgagcagatttaatgccaattatgtggtctggctaagtaatgtgttaaacacactcaacgaggggttgggattaaggtgtagattaaaaggtcatctgctcagtaagttgtacatttccactgacatctttttatcttcaacatctaatgaattttataatgtggtcaaggaatttgagggcttcatcatgtcactgatattgaaacaaactgaggaagccttatttagcacaaggttttataataacatgttgaacaacttaattgatgccattgatagggctcgactagagtatctggcccgctgtgccaattcagctgccaggattaatttacctagtacagatgttatgatagcatcattgggtgatatcttatctttgataaacgttttaggtgaatccaaccttaacaacttaagtgagttatattttatcttcaggatatttggtcaccctatggttgatgagaggaaggccatggatgcagtcagagataactgttgtgaaacaaagtttctgacggctaagaaccttgcatcgttaagaggagcatatgtttatagaattatcaaaggattcgtagcaaattataacaggtggccttacataaaaactagagtttgccttacaccaacatggattaactatcttgacaccaattcatgtccctcattattagagatgacagaagatgattttattgtgttagctggagtgcactttataagagaattccacatcccaaagctaactgatctggagattatattaaatgacaaggccatatctcctccaaaatcactcatttggtcatgctttccaaaaaactacatacctcaggttatacaagatgagtatgcccggaggtattgtagagctaaagcacctttgaagacaagacgtgtcttggagttctacttacaggacaaggatttcaagttggatcagctccatagagtagtagtgaaccaggactaccttaatgataaagaacatataatttctttaacaggaaaagaaagagagttgggtgttggtaggatgtttgccatgcaacctgggaagcagaggcaagtccaaattttagcagagaagctgttggctgataacatcctgcaattctttccggagacactgactagatacggtgatttggagctgcaaaagatactagagttaaaagctggactttcaaataaaaatgacagatctaaagactcctacaataattatataagtaggtgctcattaattactgatttaagtaaatttaaccaagcttttaggtacgagtcatcctgtgtgtgtagtgatcttttagatgagctacatgggactcaaagcttattctcttggctgcatttaacagtaccactgactactataatgtgtacatataggcatgcgccgccggacactggaaacaactataatgtagatgatattgctgagcagagtggactctaccgctaccacatgggcgggattgagggctggtgccagaagctctggacaacagaggccattgctttgctagatactgtagctgtgaagggccgtttccagctaacttcattaataaatggcgacaaccaaagtattgatatttcaaaaccaacaaggctggggaccaggactcaaagtgaagcagattatgatttggcaataaattctttaagattaatatcagcagcttataaaggcattggacataaattaaaagaaggtgagacctacttgtcacgtgacatgcagttcatgagtaaaacaatacaacatgaaggggtctactacccggcctccatcaagaaaatattaagagttggtccctggatcaacacaatattagatgatataaaaacttcaacagaaagtattggttctctaactcaagaactagaatataaaggtgaaagtttaatgagcagcctgctgctgaggaacttctggctctacagattatattcagtggatttaaaagatcattctttgtgtggaaagcagctctacagatccttaataaaagtgttaaaacatttgaagaggtgcttcaacctggagaaccttggggaatgtttggaattatttttaaatgtgcccatgcagtttggaggtgctgacccaaatgtcatctacaggagcttctacagaagaactccagattttctaacagaaagtataactcatctcatcctcattttaaaacattttagaagagatttggaattcaacaaagataatgtctccaaagctgttctttctttgctagagttcaccaagaatgattctgcagaatttgtaactttgatgagagatcctcaagcaattggtagtgagaggcaggccaagatcacttcagacatcaacagaacagctgtaacttcagtgttatcaaatgctccaaatgaaatatttagaacttcagctcttcattacagcagcacagaaaatgaattaaatggaatagcaagtggagtttctcctgtttatcctcatggtcttcgagttttatatgaaagtttacctttttataaagcagagaagattgtcaacatggtttctgggaccaagtccatcaccaacatactggagaagacatcagccatctcctacacagatataattcgagccaccaacatgatggtggagaacctcactttgctaacaagaataatgaaaccaggtgctgacacatctttggatcctgacacaatagtaataacaatattatcaaaaataataagagataaatcctgggatgttggtgatataattggtgtcacttccccatctcctgtctcctgcttcaaggtggtctacacatcaactctacaaaataattcagtagtaatagaaagatacacaacagacacctacacaagaggtaagagaggccccaccaagccctgggtgggcagcagcacacaggagaagaagtccatgcctgtctacaacagacaagttttaacaagaggacaaagagatcaaatagaaaatatagcaaagctggagtgggtgttttcttcagtagcaaatattgattctttgctaaatgagctcagcaccatgactttgggtctttctctaaggaaatgtagacaactttttccaacatatttaagtttaaacttcctgcacaggctttctgtcagcagcaggcccagagaatatccttcttctcttcctgcctacaggacaacaaattttcattttgatactggaccaataaataaagtgttaacagaaagatttggagatgaagatataaatttggtatttcaaaatgcaatatcatatggtctttccaccatgtctttggtggagcagtttactggtgtctgtccaaataaagttttgctggtgcccaagctacaagaaatacaactaatgaaagttccaatatttcaaggtggcttcaacctacaaagtataattccaataataaggcagcagcacatgttcctgcccaaccacatcactccagcccagtatattgaattatttctttcttcaaaacaatttcattcaagaataaatttaaaacacaacaacagatttaaacttgttttacaaaaagattattttaatggggagaacatgatagaaactttgtccacctgtttggcaggccactggatcatcattttgatgctaatgaaggagagtcaggggatatttgacaaggagtggtatgatggttttgtaacagaccacatgttcctggacctgcagctcttcctctcctccttcaagacatttctaactgtcttcaactttgcttatttaaaagttggttcaaatatagaagaaataacaggaaatcaagccaacctgctggagctgctggacctgggctactggaagaacatgtataaagtattttcagagaccaaggtgcggctggctttgctaaaacaagatttatcatttaattctgtgaagaacagcagcagcttccggcactggtttataaattctctacaagaagtacaatgtacttctgtgccttgggtggtaaatgtaacaagaaatccaactcatttaaaaggtgttctacagtacatgaagatgatagaaagtggcatgattcaaggttattcagcaaatatttcttcagttttaagtatcccatataattatccagacatggcgcacatgatgacaaaaataataagaaatcgaggccacatgtcctatgattatccaaagatgaagaaaagtttaactttctccatgacagacatgagtgacagctacatgctcaacctcttccccaaagtagaatgttcttacatgagtggttatttggataaactagatgatactctacaacttctaaagaaacctcctgttggaagaaaagttccttctgtggctttgccctggcaccactgcaacagatacaactttgtcttcagcagcacaggctgcaaagtttctgtcattgacatgcttccaaaacatttccgaagaagtaatttaaaagtaatatgttttattggagaaggggcgggcaacctcatgctaagagctgttttggaagttggtggaaatataaaattaatatatagatccttaaaagatcctgatgatcatcatgttcctgtagaatttctaagattaaaaccttgttatccttatattgatactggtggcagtttatctttggcttcaacagatgccaccaacaaggcccactgggattatttacatcttcactggacagatcctttaaatttaatagtatgtgatgcagaaataagtggtgtgaagcactggctaaaaattcttcacaggtggtatgagcacatgacttcctgcaagcactgtttaaaatcagaacatgataaatatttaataataaaatatcatgctcaagatgatttaatagatcttcctcatggtgtcaggctactaaaatgtaacatctgcctgggctccaaactaagtggcagtgagagctacctgctcattggtcttggtctttcaaataaacttcctgtctacagtgaagttcttcattcaaaacttcttttggcagaatgtcatcagtttcatcatccaaaatatttggatgtttctggaataaatacaaatataaaatccttaataccaatgttggattatccaataacttacaacaagatcaccactttgctagaaagtgtgcgggagctttcttcaaataaaaacaagaacaccatgtggattggaagaaatcctgtctaccataataaatggctaaagaggaaatatttcaacattttaaaatggctaaaatactgtatagaacttcctgccttcaggatggattataattcatttgagagaatagaaatgctttatccaaatttaagagatttggtagattctgtttctacttcagagctgaagaaagtaataaaagtaacaggcatcctcttcaggagcaacaccatgtgaattaatatgccaatgctaacatgtcatccccactactttttttgttcaatcactctcagtctagacatgtgagaagatcccaaacccaactgcacccctcccactcgaaatcagttgtagcctcagcagctccatctgccatgatctctgaccagcagcaaatgtattattattttaatttgtctatagttaacaaaaaattgatatctcacaggttgtaaacatagttcttttataattattgttagttaaactattgtgtttgacttcctttgggtatttttttcccgtgggtcggcatggcatctccacctcctcgcggtccgacctgggcatccgaaggaggacgcacgtccactcggatggctaagggagagcctgcagtagcataaccccttggggcctctaaacgggtcttgaggggttttttgctgaaaggaggaactatatacgcgtcgacgggcccgcgctcactggccgtcgttttacaacgtcgtgactgggaaaaccctggcgttacccaacttaatcgccttgcagcacatccccctttcgccagctggcgtaatagcgaagaggcccgcaccgatcgcccttcccaacagttgcgcagcctgaatggcgaatgggacgcgccctgtagcggcgcattaagcgcggcgggtgtggtggttacgcgcagcgtgaccgctacacttgccagcgccctagcgcccgctcctttcgctttcttcccttcctttctcgccacgttcgccggctttccccgtcaagctctaaatcgggggctccctttagggttccgatttagtgctttacggcacctcgaccccaaaaaacttgattagggtgatggttcacgtagtgggccatcgccctgatagacggtttttcgccctttgacgttggagtccacgttctttaatagtggactcttgttccaaactggaacaacactcaaccctatctcggtctattcttttgatttataagggattttgccgatttcggcctattggttaaaaaatgagctgatttaacaaaaatttaacgcgaattttaacaaaatattaacgcttacaatttaggtggcacttttcggggaaatgtgcgcggaacccctatttgtttatttttctaaatacattcaaatatgtatccgctcatgagacaataaccctgataaatgcttcaataatattgaaaaaggaagagtatgagtattcaacatttccgtgtcgcccttattcccttttttgcggcattttgccttcctgtttttgctcacccagaaacgctggtgaaagtaaaagatgctgaagatcagttgggtgcacgagtgggttacatcgaactggatctcaacagcggtaagatccttgagagttttcgccccgaagaacgttttccaatgatgagcacttttaaagttctgctatgtggcgcggtattatcccgtattgacgccgggcaagagcaactcggtcgccgcatacactattctcagaatgacttggttgagtactcaccagtcacagaaaagcatcttacggatggcatgacagtaagagaattatgcagtgctgccataaccatgagtgataacactgcggccaacttacttctgacaacgatcggaggaccgaaggagctaaccgcttttttgcacaacatgggggatcatgtaactcgccttgatcgttgggaaccggagctgaatgaagccataccaaacgacgagcgtgacaccacgatgcctgtagcaatggcaacaacgttgcgcaaactattaactggcgaactacttactctagcttcccggcaacaattaatagactggatggaggcggataaagttgcaggaccacttctgcgctcggcccttccggctggctggtttattgctgataaatctggagccggtgagcgtgggtctcgcggtatcattgcagcactggggccagatggtaagccctcccgtatcgtagttatctacacgacggggagtcaggcaactatggatgaacgaaatagacagatcgctgagataggtgcctcactgattaagcattggtaactgtcagaccaagtttactcatatatactttagattgatttaaaacttcatttttaatttaaaaggatctaggtgaagatcctttttgataatctcatgaccaaaatcccttaacgtgagttttcgttccactgagcgtcagaccccgtagaaaagatcaaaggatcttcttgagatcctttttttctgcgcgtaatctgctgcttgcaaacaaaaaaaccaccgctaccagcggtggtttgtttgccggatcaagagctaccaactctttttccgaaggtaactggcttcagcagagcgcagataccaaatactgtccttctagtgtagccgtagttaggccaccacttcaagaactctgtagcaccgcctacatacctcgctctgctaatcctgttaccagtggctgctgccagtggcgataagtcgtgtcttaccgggttggactcaagacgatagttaccggataaggcgcagcggtcgggctgaacggggggttcgtgcacacagcccagcttggagcgaacgacctacaccgaactgagatacctacagcgtgagctatgagaaagcgccacgcttcccgaagggagaaaggcggacaggtatccggtaagcggcagggtcggaacaggagagcgcacgagggagcttccagggggaaacgcctggtatctttatagtcctgtcgggtttcgccacctctgacttgagcgtcgatttttgtgatgctcgtcaggggggcggagcctatggaaaaacgccagcaacgcggcctttttacggttcctggccttttgctggccttttgctcacatgttctttcctgcgttatcccctgattctgtggataaccgtattaccgcctttgagtgagctgataccgctcgccgcagccgaacgaccgagcgcagcgagtcagtgagcgaggaagcggaagagcgcccaatacgcaaaccgcctctccccgcgcgttggccgattcattaatgcagctggcacgacaggtttcccgactggaaagcgggcagtgagcgcaacgcaattaatgtgagttagctcactcattaggcaccccaggctttacactttatgcttccggctcgtatgttgtgtggaattgtgagcggataacaatttcacacaggaaacagctatgaccatgattacgccaagcgcgcccgggtaatacgactcactataggg

SEQ ID NO: 9 - DNA, 18762 bp, synthetic construct
  source 1..18762: mol_type = other DNA
acgcgaaaaaatgcataacaaaactatcaacctgaaaaaagttaggacaagtgaagattgctagtcccaaagaccagaatcatgggctgtaatgtgatgatggagcttgattatggtggacgagctgcatggctggcattccacataaccaactttgataggtcagatttggaaactatcctaagaggtgctagggtgtgcaatacatggcaagatcagagactctccgtgtaccttgtgggaagggattgcaatttgttaagaccatttgtgcaagctgccaaatttatccataatactaggagaggccaaacattaacacattggttcacaaaaaatatcgtgtttagttctacagggcaagagacagagcctcccattgaccccacatgtgagctgttggtagagctgatcagtggttaagatgacagcacattatgtagttaattaaaacaaagggtaggacaagtcctaatgtccacagctatgaacaagttcactcagaccatctctaaacctgccactatcttgaatatttcagacagtgaagagtcgggcgatgaggcaggggtgggcaaggtgtcccgtaccacacagagctcagagaggtggcttgatttgctcattgaaaagttccagccgagcctacaaaacatcactagatacatcaactggaacttcatcaggatctgcaatgataggcttaaaaaagaaaaaatggggtacattgaggccaagcaatatgtggaagacatggcttggatggtgatagcatctgaggcagacagcattgagtggaagtgcataaggaggcaggagaaagtgactggggtgaaatacccaaagttcttctttgtacaacacaaagaggactggattgagtgcacaggatgcattccgtacccaggccatgacttgatctatgatgaggatgatgatgactgagctgactcagatcactccaaccagcagagagatccatagttatagaaaaacattaggataaatacacatcctaggccgccaccatgtttgtttttcttgttttattgccactagtctctagtcagtgtgttaatcttacaaccagaactcaattaccccctgcatacactaattctttcacacgtggtgtttattaccctgacaaagttttcagatcctcagttttacattcaactcaggacttgttcttacctttcttttccaatgttacttggttccatgctatacatgtctctgggaccaatggtactaagaggtttgataaccctgtcctaccatttaatgatggtgtttattttgcttccactgagaagtctaacataataagaggctggatttttggtactactttagattcgaagacccagtccctacttattgttaataacgctactaatgttgttattaaagtctgtgaatttcaattttgtaatgatccatttttgggtgtttattaccacaaaaacaacaaaagttggatggaaagtgagttcagagtttattctagtgcgaataattgcacttttgaatatgtctctcagccttttcttatggaccttgaaggaaaacagggtaatttcaaaaatcttagggaatttgtgtttaagaatattgatggttattttaaaatatattctaagcacacgcctattaatttagtgcgtgatctccctcagggtttttcggctttagaaccattggtagatttgccaataggtattaacatcactaggtttcaaactttacttgctttacatagaagttatttgactcctggtgattcttcttcaggttggacagctggtgctgcagcttattatgtgggttatcttcaacctaggacttttctattaaaatataatgaaaatggaaccattacagatgctgtagactgtgcacttgaccctctctcagaaacaaagtgtacgttgaaatccttcactgtagaaaaaggaatctatcaaacttctaactttagagtccaaccaacagaatctattgttagatttcctaatattacaaacttgtgcccttttggtgaagtttttaacgccaccagatttgcatctgtttatgcttggaacaggaagagaatcagcaactgtgttgctgattattctgtcctatataattccgcatcattttccacttttaagtgttatggagtgtctcctactaaattaaatgatctctgctttactaatgtctatgcagattcatttgtaattagaggtgatgaagtcagacaaatcgctccagggcaaactggaaagattgctgattataattataaattaccagatgattttacaggctgcgttatagcttggaattctaacaatcttgattctaaggttggtggtaattataattacctgtatagattgtttaggaagtctaatctcaaaccttttgagagagatatttcaactgaaatctatcaggccggtagcacaccttgtaatggtgttgaaggttttaattgttactttcctttacaatcatatggtttccaacccactaatggtgttggttaccaaccatacagagtagtagtactttcttttgaacttctacatgcaccagcaactgtttgtggacctaaaaagtctactaatttggttaaaaacaaatgtgtcaatttcaacttcaatggtttaacaggcacaggtgttcttactgagtctaacaaaaagtttctgcctttccaacaatttggcagagacattgctgacactactgatgctgtccgtgatccacagacacttgagattcttgacattacaccatgttcttttggtggtgtcagtgttataacaccaggaacaaatacttctaaccaggttgctgttctttatcaggatgttaactgcacagaagtccctgttgctattcatgcagatcaacttactcctacttggcgtgtttattctacaggttctaatgtttttcaaacacgtgcaggctgtttaataggggctgaacatgtcaacaactcatatgagtgtgacatacccattggtgcaggtatatgcgctagttatcagactcagactaattctcctgggtctgcatccagtgtagctagtcaatccatcattgcctacactatgtcacttggtgcagaaaattcagttgcttactctaataactctattgccatacccacaaattttactattagtgttaccacagaaattctaccagtgtctatgaccaagacatcagtagattgtacaatgtacatttgtggtgattcaactgaatgcagcaatcttttgttgcaatatggcagtttttgtacacaattaaaccgtgctttaactggaatagctgttgaacaagacaaaaacacccaagaagtttttgcacaagtcaaacaaatttacaaaacaccaccaattaaagattttggtggttttaatttttcacaaatattaccagatccatcaaaaccaagcaagaggtcatttattgaagatctacttttcaacaaagtgacacttgcagatgctggcttcatcaaacaatatggtgattgccttggtgatattgctgctagagacctcatttgtgcacaaaagtttaacggccttactgttttgccacctttgctcacagatgaaatgattgctcaatacacttctgcactgttagcgggtacaatcacttctggttggacctttggtgcaggtgctgcattacaaataccatttgctatgcaaatggcttataggtttaatggtattggagttacacagaatgttctctatgagaaccaaaaattgattgccaaccaatttaatagtgctattggcaaaattcaagactcactttcttccacagcaagtgcacttggaaaacttcaagatgtggtcaaccaaaatgcacaagctttaaacacgcttgttaaacaacttagctccaattttggtgcaatttcaagtgttttaaatgatatcctttcacgtcttgaccctccagaggctgaagtgcaaattgataggttgatcacaggcagacttcaaagtttgcagacatatgtgactcaacaattaattagagctgcagaaatcagagcttctgctaatcttgctgctactaaaatgtcagagtgtgtacttggacaatcaaaaagagttgatttttgtggaaagggctatcatcttatgtccttccctcagtcagcacctcatggtgtagtcttcttgcatgtgacttatgtccctgcacaagaaaagaacttcacaactgctcctgccatttgtcatgatggaaaagcacactttcctcgtgaaggtgtctttgtttcaaatggcacacactggtttgtaacacaaaggaatttttatgaaccacaaatcattactacagacaacacatttgtgtctggtaactgtgatgttgtaataggaattgtcaacaacacagtttatgatcctttgcaacctgaattagactcattcaaggaggagttggataagtattttaagaatcatacatcaccagatgttgatttaggtgacatctctggcattaatgcttcagttgtaaacattcaaaaagaaattgaccgcctcaatgaggttgccaagaatttaaatgaatctctcatcgatctccaagaacttggaaagtatgagcagtacatcaagtggccatggtacatttggctaggttttatagctggcttgattgccatagtaatggtgacaattatgctttgctgtatgaccagttgctgtagttgtctcaagggctgttgttcttgtggatcctgctgcaaatttgatgaagacgactctgagccagtgctcaaaggagtcaaattacattacacataatgaccacctatagcaagtgatgtagtatttagtctatgattagttatagaaaaacattaggataaatacacatcctaggccgggccaaaatgtctctagacagattgaagctcaatgatgtctcaaacaaggatagcctgctgtccaactgcaaatacagtgttaccagatccacaggcgatgtaaccagtgtgtctggtcatgctatgcagaaagcccttgcaaggacactcggcatgttcttacttactgccttcaaccgttgcgaagaagtggcagaaatagggctccaatatgccatgtccttgctaggcagagatgatagcatcaagatattaagagaagccggctacaatgtaaaatgtgtggacacacagctcaaggactttacaatcaaattacaaggaaaggaatacaaaatacaagtcctagatatagtgggaatagatgcagccaatttagctgatctagagatacaagccagaggagtggtagcaaaagaactcaaaacaggagccaggctacctgacaatcggaggcatgatgcaccagattgtggtgtgatagttctctgtattgcagcattagttgtttccaaattagctgcaggggacaggggaggacttgatgctgtggaaagaagggctttaaatgtgctgaaagccgagaaagccaggtaccccaacatggaggtcaagcagatagctgaaagtttttatgatctgtttgaaaggaagccttattacattgatgtcttcatcacttttggcctggcccagtctagtgtcaagggaggcagcaaagttgaggggctgttttcaggtctcttcatgaatgcatacggggcaggacaagttatgctgaggtggggtttactggcaaaatctgtcaagaacatcatgctaggccatgctagtgtacaagctgagatggaacaggtggttgaggtttacgaatatgctcagaagcaaggaggggaggcaggattctatcacatcagaaataatccaaaagcttcacttctctctttgaccaattgtcctaatttcaccagtgttgtgcttggcaatgctgcaggtttaggcatcatagggtcatataagggtgctcctaggaatagagaactctttgatgctgccaaagattatgcagaaagattaaaggacaacaatgtaattaactacagtgcattaaacttgactgcagaagaaagagagctgatcagccagcagctgaacattgttgatgacactcctgatgatgatatttaattaaaactggaaaatgtaggataaatatggagaaattcgcccccgaatttgttggcgaggatgctaacaagaaggcagaggagtttctcaaacatagatccttcccttcggaaaaaccactagctggtataccgaacactgccactcatgtcaccaaatataacatgccccctatattgcgtagctcattcaaactcccttccccgagagttgctgcaaatcttactgaaccctctgctccccctaccactccaccacccacacctccccagaacaaggaagagcagcccaaagagtctgatgttgacattgagactatgcatgtctgtaaggttcctgacaatccggaacacagcaagaagccatgctgctcagatgataccgatactaagaaaactaggaagccgatggtcacctttgtggaacccgaggagaaatttgtcggattgggagctagcttgtacagggagaccatgcagacctttgctgctgatggttatgatgaagaaagcaacctatcgtttgaggagactaaccaagagccgggttcttcatctgtagaacaaagactagatagaatagaggagaaattgtcctacataataggccttttaaacaccataatggtagcgactgctggacctaccactgctagagatgagattagagatgcccttataggcactagagaagaacttattgagatgatcaagtctgacatcttgactgtcaatgacagaatagtggccatggagaagctcagagatgaggaatgctccagagctgacactgatgatggatcagcctgttatttaacagacagagcaaggatactagataagatagtgtccagcaatgctgaagaggctaaggaagatttggatgttgatgacatcatgggcattaatttttagttaattaaaataacaacaggacaaataatggaggcctacttggtagagatgtaccatggtgtcccatatacagctgcagtacagctaaacttggttgaaaaacattcagccaacatatcactaactgtgtggataccgatgtttcaaacatctctaccaaagaactccgttatggacctgctacatgatgttacagtcatttgtacacagatatcaacagtgcatggtcccatgatcaaggtagatctgagctcttccaatgcaggtttagctaccatgccaaggcaattcttgataaatgctatcatagctttggatgactggggcaacatggattacgaagtgcctgttgcttttgataaaaagagcttctgtgtgacaattcttaagcctaaaaacatgctttacactgtacccagcattactcccactaatcgacctactcatgagctgatagctgtctgctctttccataacagggtaacattaaagtcattcaatatacctgtcttcatcagagcactgtctatcagacagcaggaccttgatagtgtggagcaggctataagctccgatgtggaccatgctataacaacagctagggtggctccctatgcagggcttacacttgtgatcaacatcacatccaccaaaggagcattcaaactgctaaaggcaggtagtcagattcttgcagaactgggtccctatctgacgcaggtgagcctacatgatgtgattatgaactggaaacatacaggcacttcctacatactcaagagctcctcaacaagtggatgaaaaagagaaagtcaccattgatcagctcaatccacaactacaaccccacgatttcacacagcacaacaaccaccgccaccaacatccacatgacaaccacacatacacacccacatacatatatacacatatcttagttaaataaaatcaggataaataatggatcctaacatgacctcacaccagatcaccctcgagatcaacatgaccagcagccgtattggcacatacactacaccagccccaacagctcttctccttgcatgtgccgtcatcaacacagtgtgtgcgctgataatggcctgcagcagtagaagcactgccacatcaggcattgtcagcagccaatgcacagttcatcccaatcaccctccaccaagttatggcgtcaatgtaactggtctgccgggtaacctatactcaaggaacactacataacattataaataacagaaattatccttcaataaaccccaggccagacagctttaccctgctagacgattcaatcagcccttgcagtatgtcgtctagttaacaaaaaaccggtaggataagtactatcctattggaaccaaacgagacctgtagagcagctcacacaagagaaccacaagctgacttcacctagtatgggaaggaacttagaagtgagtggcagcattaccaatttgaactttgagagaactcagcatcctgacacatttaggactgttgtaaaagtgaaccaaatgtgtaagcttattgcaggtgtgctcacaagtgctgctgtggcagtttgtgtgggggtcataatgtattctgttttcacatcaaaccacaaggccaactccacgcagaatgccacgacccggaacagcacatccacccctccccaaccaaccgccggtctgcccaccacagagcaagggaccatccccagattcaccaaaccccccaccaaaaccgccacccaccatgagatcacagagcccgtcaaaatggcaacaccttcagaggatccctaccaatgctccagcaatggttatttggaccgacctgatttacctgaaaatttcaaactcgtattggatgttatatgcaagcctccaggtcctgaacatcacaacaccagctgttatgagaaacgtgaaatcaacccaggaagtgtttgccctgatcttgtaacaatgaaggcaaacatgggcttaaacaatggtggtggggaggatgctgcaccttatatagaggttaccaccctttctacgtactccaacaaaagggcaatgtgtgtccacaatgggtgtgatcaaggcttctgtttcttcctttctggtttaagcactgatcaggagagagctgtgctagagcttggaggtcaacaggctatcatggagttgcattatgattcctactggaaacactattggagtaactctaattgtgttgttcccagaacaaactgcaacctgacagaccaaactgagattttgtttcctaggtttaacaacaagaatcagtctcagtgtaccacctgtgcagattcagctggcctagataacaaattttatctcacatgtgatgggcttttaagaaccctccctctagttggactacccagcctaagtcctcaggcttacaaagctgtacccacacaaactacaggcaccaccacggcaccaacatcagagacgaggcacccaacccctgcacccaggaggtccaaacctctcagtcggaagaagagagctttatgtggtgtagactcaagcagagaacccaaaccaacaatgccttactggtgtcctatgctccaattatttccaaggaggtctaattcttaagtgacctattcctgaattaacttcagaataagtaccaaccttatcagtagttaatgaaaactaagctttgatataataggacaaatatgattcctggcaggatctttctagtccttctggtgatcttcaacaccaagccaattcacccaaatacattaacagaaaaattctatgagtccacatgtagtgttgagactgcaggttataagagtgcccttagaacaggttggcatatgacagttatgtcaattaagttgtctcaaataaatattgagtcatgcaagagcagcaactcgttattggctcatgagcttgcaatctatagtagtgcagtggatgaattgagaacgttatcatccaatgccttgaagtccaaaaggaagaagaggttcctcggtttgattcttggtctcggagctgcagtcactgccggggtggctttagccaagacagtgcaacttgaaagtgagattgcattgattagagatgcagtgagaaatacaaatgaggctgttgttagcctaaccaacggcatgtcagtgttggctaaagtggtggatgatttgaaaaacttcatatctaaagaattactcccaaaaataaaccgagtctcttgtgatgtgcacgacatcactgccgtcattagattccaacagctcaacaaaagacttttggaagtatctcgtgaattttcatctaatgcaggattaacacacactgtttcatcttttatgttaacagaccgggaactcacctccattgtaggcggcatggctgtttcagcaggccaaaaagagataatgctatctagcaaagctataatgagaagaaatgggttagcaatattaagttcagtcaacgctgacacactggtttatgtaatacaactcccattatttggtgttatggacacagattgttgggtaataagaagttctatagactgtcataacatagcagacaagtatgcttgtttggctagagctgataatggctggtattgtcacaatgctggctcattatcatacttcccgtcgccaacggattgtgagatccacaatgggtatgctttctgtgacactctaaaaagtctaactgtacctgtaacatcacgagaatgcaactcaaacatgtataccactaactacgattgtaagatttccacaagtaaaacttatgtgagtacagcggtactgactacaatgggttgcttggtatcttgttatggtcataacagttgcacagtcatcaataatgacaaaggtataataaggactctgccagatggttgccactacatctccaacaaaggtgtggacagggttcaagtaggtaacactgtttactatcttagcaaagaagttggcaagtcaattgttgtcagaggggaaccattggtcttgaaatatgaccctttgagtttccctgacgataaatttgatgttgctataagagatgtggagcatagcatcaatcagacacgcacattcttgaaggcctctgatcagttattggacttaagtgaaaacagagagaataaaaatttaaacaagtcatatatactaacaactctgctcttcgttgtaatgcttattataataatggctgtcatagggttcattctgtataaggtattgaaaatgatcagagacaacaagttgaaatccaaaagtacacctggcctcacagttttatcatgacaattgtaccaaaccataattgagttagttaattaaaaacttaggataagtgacaatccagacccaacacctctttcaactctcaaggataaggtaggatgagtgtgagaccttgcaaatttgaggttcaagggttttgttccagagggaggaattgcaagtatagtcataaatattgggaatggcctttgaaaactcttatgctcaggcagaactacatgcttaataggatttataggttcctcgacaccaacacagatgcaatgtcagatgtcagcggatttgatgcaccacaaaggactgctgagtatgccttgggaaccataggtgtgctgaaaagttacctggaaaaaactaacaacatcactaaatcaatagcttgtggcagtttgatcactgtattgcagaacttggatgttggtctagtaatacaagcaagagatagcaacactgaggacaccaattacttgagaagttgcaacactatactgtcttatatagacaagatacacaagaagagacaaattattcacattctcaaaagactgccagtaggagtactatgcaatctgatccaatctgtcatctccatcgaggagaagataaattcttctatgaaaacagaatgataaggctgcctaaatactatccagccatactgcataagatgtatattattagagtaaatagaaacctcacttacgatgggtctggaccatccacaataatagatgcaggaaagtctgtggtgtggaatcgtgttgatgtgatagcttgtgtgaaagaggccttgtgctgcatagaattcagctggaataaccaagtgatcatagactttgattatagccaggccagatgatgtggactgtattcctttttttgtcagtaatcagttattaacccaaaattgttaattatgtagactttaagttaactaacttcatgttaattcaatagttatataaaaaaatattcgaattaggatcaatatggatcctattgatgaacaagaagttaatgtgtacttgccggatagctacttaaagggtgttatatcttttagtgaaactaatgctcttggcagctgtatcattggtagacctttcttgaaggatgactttactgccactacttcaatccgtaaccccctaattgaacataaaagaataagggacactaaattagtaaaaaatattgtttcaaaccctcaatataggttagtggagcctctccaaatgcagcatgagctcttgagtgtactatcgcccaatttcatattgcacactgccaacttaaggaaaattatacaaagaagtgttgacataacagataaaaagttgaaccccattttgcacattttgaatcttaattctcctaaccaagagggtaaggtgtcggaacggctaactaggctaattaagaaacatctctctcacatacctaattgggtaagcagctggtacaatatatgggtcaatcttaacaacttactgcaggagtaccgttcaaaggaagttatagaccataactgtgttctgactaggcaattgtctggaagtttcatacatgtggtcatgagtcaatatggagttgtgataattagcaaaaaaagtaaaagatatacaatgtgtacttataaccaattcctaacctggaaggaccttgccttgagcagatttaatgccaattatgtggtctggctaagtaatgtgttaaacacactcaacgaggggttgggattaaggtgtagattaaaaggtcatctgctcagtaagttgtacatttccactgacatctttttatcttcaacatctaatgaattttataatgtggtcaaggaatttgagggcttcatcatgtcactgatattgaaacaaactgaggaagccttatttagcacaaggttttataataacatgttgaacaacttaattgatgccattgatagggctcgactagagtatctggcccgctgtgccaattcagctgccaggattaatttacctagtacagatgttatgatagcatcattgggtgatatcttatctttgataaacgttttaggtgaatccaaccttaacaacttaagtgagttatattttatcttcaggatatttggtcaccctatggttgatgagaggaaggccatggatgcagtcagagataactgttgtgaaacaaagtttctgacggctaagaaccttgcatcgttaagaggagcatatgtttatagaattatcaaaggattcgtagcaaattataacaggtggccttacataaaaactagagtttgccttacaccaacatggattaactatcttgacaccaattcatgtccctcattattagagatgacagaagatgattttattgtgttagctggagtgcactttataagagaattccacatcccaaagctaactgatctggagattatattaaatgacaaggccatatctcctccaaaatcactcatttggtcatgctttccaaaaaactacatacctcaggttatacaagatgagtatgcccggaggtattgtagagctaaagcacctttgaagacaagacgtgtcttggagttctacttacaggacaaggatttcaagttggatcagctccatagagtagtagtgaaccaggactaccttaatgataaagaacatataatttctttaacaggaaaagaaagagagttgggtgttggtaggatgtttgccatgcaacctgggaagcagaggcaagtccaaattttagcagagaagctgttggctgataacatcctgcaattctttccggagacactgactagatacggtgatttggagctgcaaaagatactagagttaaaagctggactttcaaataaaaatgacagatctaaagactcctacaataattatataagtaggtgctcattaattactgatttaagtaaatttaaccaagcttttaggtacgagtcatcctgtgtgtgtagtgatcttttagatgagctacatgggactcaaagcttattctcttggctgcatttaacagtaccactgactactataatgtgtacatataggcatgcgccgccggacactggaaacaactataatgtagatgatattgctgagcagagtggactctaccgctaccacatgggcgggattgagggctggtgccagaagctctggacaacagaggccattgctttgctagatactgtagctgtgaagggccgtttccagctaacttcattaataaatggcgacaaccaaagtattgatatttcaaaaccaacaaggctggggaccaggactcaaagtgaagcagattatgatttggcaataaattctttaagattaatatcagcagcttataaaggcattggacataaattaaaagaaggtgagacctacttgtcacgtgacatgcagttcatgagtaaaacaatacaacatgaaggggtctactacccggcctccatcaagaaaatattaagagttggtccctggatcaacacaatattagatgatataaaaacttcaacagaaagtattggttctctaactcaagaactagaatataaaggtgaaagtttaatgagcagcctgctgctgaggaacttctggctctacagattatattcagtggatttaaaagatcattctttgtgtggaaagcagctctacagatccttaataaaagtgttaaaacatttgaagaggtgcttcaacctggagaaccttggggaatgtttggaattatttttaaatgtgcccatgcagtttggaggtgctgacccaaatgtcatctacaggagcttctacagaagaactccagattttctaacagaaagtataactcatctcatcctcattttaaaacattttagaagagatttggaattcaacaaagataatgtctccaaagctgttctttctttgctagagttcaccaagaatgattctgcagaatttgtaactttgatgagagatcctcaagcaattggtagtgagaggcaggccaagatcacttcagacatcaacagaacagctgtaacttcagtgttatcaaatgctccaaatgaaatatttagaacttcagctcttcattacagcagcacagaaaatgaattaaatggaatagcaagtggagtttctcctgtttatcctcatggtcttcgagttttatatgaaagtttacctttttataaagcagagaagattgtcaacatggtttctgggaccaagtccatcaccaacatactggagaagacatcagccatctcctacacagatataattcgagccaccaacatgatggtggagaacctcactttgctaacaagaataatgaaaccaggtgctgacacatctttggatcctgacacaatagtaataacaatattatcaaaaataataagagataaatcctgggatgttggtgatataattggtgtcacttccccatctcctgtctcctgcttcaaggtggtctacacatcaactctacaaaataattcagtagtaatagaaagatacacaacagacacctacacaagaggtaagagaggccccaccaagccctgggtgggcagcagcacacaggagaagaagtccatgcctgtctacaacagacaagttttaacaagaggacaaagagatcaaatagaaaatatagcaaagctggagtgggtgttttcttcagtagcaaatattgattctttgctaaatgagctcagcaccatgactttgggtctttctctaaggaaatgtagacaactttttccaacatatttaagtttaaacttcctgcacaggctttctgtcagcagcaggcccagagaatatccttcttctcttcctgcctacaggacaacaaattttcattttgatactggaccaataaataaagtgttaacagaaagatttggagatgaagatataaatttggtatttcaaaatgcaatatcatatggtctttccaccatgtctttggtggagcagtttactggtgtctgtccaaataaagttttgctggtgcccaagctacaagaaatacaactaatgaaagttccaatatttcaaggtggcttcaacctacaaagtataattccaataataaggcagcagcacatgttcctgcccaaccacatcactccagcccagtatattgaattatttctttcttcaaaacaatttcattcaagaataaatttaaaacacaacaacagatttaaacttgttttacaaaaagattattttaatggggagaacatgatagaaactttgtccacctgtttggcaggccactggatcatcattttgatgctaatgaaggagagtcaggggatatttgacaaggagtggtatgatggttttgtaacagaccacatgttcctggacctgcagctcttcctctcctccttcaagacatttctaactgtcttcaactttgcttatttaaaagttggttcaaatatagaagaaataacaggaaatcaagccaacctgctggagctgctggacctgggctactggaagaacatgtataaagtattttcagagaccaaggtgcggctggctttgctaaaacaagatttatcatttaattctgtgaagaacagcagcagcttccggcactggtttataaattctctacaagaagtacaatgtacttctgtgccttgggtggtaaatgtaacaagaaatccaactcatttaaaaggtgttctacagtacatgaagatgatagaaagtggcatgattcaaggttattcagcaaatatttcttcagttttaagtatcccatataattatccagacatggcgcacatgatgacaaaaataataagaaatcgaggccacatgtcctatgattatccaaagatgaagaaaagtttaactttctccatgacagacatgagtgacagctacatgctcaacctcttccccaaagtagaatgttcttacatgagtggttatttggataaactagatgatactctacaacttctaaagaaacctcctgttggaagaaaagttccttctgtggctttgccctggcaccactgcaacagatacaactttgtcttcagcagcacaggctgcaaagtttctgtcattgacatgcttccaaaacatttccgaagaagtaatttaaaagtaatatgttttattggagaaggggcgggcaacctcatgctaagagctgttttggaagttggtggaaatataaaattaatatatagatccttaaaagatcctgatgatcatcatgttcctgtagaatttctaagattaaaaccttgttatccttatattgatactggtggcagtttatctttggcttcaacagatgccaccaacaaggcccactgggattatttacatcttcactggacagatcctttaaatttaatagtatgtgatgcagaaataagtggtgtgaagcactggctaaaaattcttcacaggtggtatgagcacatgacttcctgcaagcactgtttaaaatcagaacatgataaatatttaataataaaatatcatgctcaagatgatttaatagatcttcctcatggtgtcaggctactaaaatgtaacatctgcctgggctccaaactaagtggcagtgagagctacctgctcattggtcttggtctttcaaataaacttcctgtctacagtgaagttcttcattcaaaacttcttttggcagaatgtcatcagtttcatcatccaaaatatttggatgtttctggaataaatacaaatataaaatccttaataccaatgttggattatccaataacttacaacaagatcaccactttgctagaaagtgtgcgggagctttcttcaaataaaaacaagaacaccatgtggattggaagaaatcctgtctaccataataaatggctaaagaggaaatatttcaacattttaaaatggctaaaatactgtatagaacttcctgccttcaggatggattataattcatttgagagaatagaaatgctttatccaaatttaagagatttggtagattctgtttctacttcagagctgaagaaagtaataaaagtaacaggcatcctcttcaggagcaacaccatgtgaattaatatgccaatgctaacatgtcatccccactactttttttgttcaatcactctcagtctagacatgtgagaagatcccaaacccaactgcacccctcccactcgaaatcagttgtagcctcagcagctccatctgccatgatctctgaccagcagcaaatgtattattattttaatttgtctatagttaacaaaaaattgatatctcacaggttgtaaacatagttcttttataattattgttagttaaactattgtgtttgacttcctttgggtatttttttcccgt

SEQ ID NO: 10 - DNA, 21754 bp, synthetic construct
  source 1..21754: mol_type = other DNA
acgcgaaaaaatgcataacaaaactatcaacctgaaaaaagttaggacaagtgaagattgctagtcccaaagaccagaatcatgggctgtaatgtgatgatggagcttgattatggtggacgagctgcatggctggcattccacataaccaactttgataggtcagatttggaaactatcctaagaggtgctagggtgtgcaatacatggcaagatcagagactctccgtgtaccttgtgggaagggattgcaatttgttaagaccatttgtgcaagctgccaaatttatccataatactaggagaggccaaacattaacacattggttcacaaaaaatatcgtgtttagttctacagggcaagagacagagcctcccattgaccccacatgtgagctgttggtagagctgatcagtggttaagatgacagcacattatgtagttaattaaaacaaagggtaggacaagtcctaatgtccacagctatgaacaagttcactcagaccatctctaaacctgccactatcttgaatatttcagacagtgaagagtcgggcgatgaggcaggggtgggcaaggtgtcccgtaccacacagagctcagagaggtggcttgatttgctcattgaaaagttccagccgagcctacaaaacatcactagatacatcaactggaacttcatcaggatctgcaatgataggcttaaaaaagaaaaaatggggtacattgaggccaagcaatatgtggaagacatggcttggatggtgatagcatctgaggcagacagcattgagtggaagtgcataaggaggcaggagaaagtgactggggtgaaatacccaaagttcttctttgtacaacacaaagaggactggattgagtgcacaggatgcattccgtacccaggccatgacttgatctatgatgaggatgatgatgactgagctgactcagatcactccaaccagcagagagatccatagttatagaaaaacattaggataaatacacatcctaggccgccaccatgtttgtttttcttgttttattgccactagtctctagtcagtgtgttaatcttacaaccagaactcaattaccccctgcatacactaattctttcacacgtggtgtttattaccctgacaaagttttcagatcctcagttttacattcaactcaggacttgttcttacctttcttttccaatgttacttggttccatgctatacatgtctctgggaccaatggtactaagaggtttgataaccctgtcctaccatttaatgatggtgtttattttgcttccactgagaagtctaacataataagaggctggatttttggtactactttagattcgaagacccagtccctacttattgttaataacgctactaatgttgttattaaagtctgtgaatttcaattttgtaatgatccatttttgggtgtttattaccacaaaaacaacaaaagttggatggaaagtgagttcagagtttattctagtgcgaataattgcacttttgaatatgtctctcagccttttcttatggaccttgaaggaaaacagggtaatttcaaaaatcttagggaatttgtgtttaagaatattgatggttattttaaaatatattctaagcacacgcctattaatttagtgcgtgatctccctcagggtttttcggctttagaaccattggtagatttgccaataggtattaacatcactaggtttcaaactttacttgctttacatagaagttatttgactcctggtgattcttcttcaggttggacagctggtgctgcagcttattatgtgggttatcttcaacctaggacttttctattaaaatataatgaaaatggaaccattacagatgctgtagactgtgcacttgaccctctctcagaaacaaagtgtacgttgaaatccttcactgtagaaaaaggaatctatcaaacttctaactttagagtccaaccaacagaatctattgttagatttcctaatattacaaacttgtgcccttttggtgaagtttttaacgccaccagatttgcatctgtttatgcttggaacaggaagagaatcagcaactgtgttgctgattattctgtcctatataattccgcatcattttccacttttaagtgttatggagtgtctcctactaaattaaatgatctctgctttactaatgtctatgcagattcatttgtaattagaggtgatgaagtcagacaaatcgctccagggcaaactggaaagattgctgattataattataaattaccagatgattttacaggctgcgttatagcttggaattctaacaatcttgattctaaggttggtggtaattataattacctgtatagattgtttaggaagtctaatctcaaaccttttgagagagatatttcaactgaaatctatcaggccggtagcacaccttgtaatggtgttgaaggttttaattgttactttcctttacaatcatatggtttccaacccactaatggtgttggttaccaaccatacagagtagtagtactttcttttgaacttctacatgcaccagcaactgtttgtggacctaaaaagtctactaatttggttaaaaacaaatgtgtcaatttcaacttcaatggtttaacaggcacaggtgttcttactgagtctaacaaaaagtttctgcctttccaacaatttggcagagacattgctgacactactgatgctgtccgtgatccacagacacttgagattcttgacattacaccatgttcttttggtggtgtcagtgttataacaccaggaacaaatacttctaaccaggttgctgttctttatcaggatgttaactgcacagaagtccctgttgctattcatgcagatcaacttactcctacttggcgtgtttattctacaggttctaatgtttttcaaacacgtgcaggctgtttaataggggctgaacatgtcaacaactcatatgagtgtgacatacccattggtgcaggtatatgcgctagttatcagactcagactaattctcctgggtctgcatccagtgtagctagtcaatccatcattgcctacactatgtcacttggtgcagaaaattcagttgcttactctaataactctattgccatacccacaaattttactattagtgttaccacagaaattctaccagtgtctatgaccaagacatcagtagattgtacaatgtacatttgtggtgattcaactgaatgcagcaatcttttgttgcaatatggcagtttttgtacacaattaaaccgtgctttaactggaatagctgttgaacaagacaaaaacacccaagaagtttttgcacaagtcaaacaaatttacaaaacaccaccaattaaagattttggtggttttaatttttcacaaatattaccagatccatcaaaaccaagcaagaggtcatttattgaagatctacttttcaacaaagtgacacttgcagatgctggcttcatcaaacaatatggtgattgccttggtgatattgctgctagagacctcatttgtgcacaaaagtttaacggccttactgttttgccacctttgctcacagatgaaatgattgctcaatacacttctgcactgttagcgggtacaatcacttctggttggacctttggtgcaggtgctgcattacaaataccatttgctatgcaaatggcttataggtttaatggtattggagttacacagaatgttctctatgagaaccaaaaattgattgccaaccaatttaatagtgctattggcaaaattcaagactcactttcttccacagcaagtgcacttggaaaacttcaagatgtggtcaaccaaaatgcacaagctttaaacacgcttgttaaacaacttagctccaattttggtgcaatttcaagtgttttaaatgatatcctttcacgtcttgaccctccagaggctgaagtgcaaattgataggttgatcacaggcagacttcaaagtttgcagacatatgtgactcaacaattaattagagctgcagaaatcagagcttctgctaatcttgctgctactaaaatgtcagagtgtgtacttggacaatcaaaaagagttgatttttgtggaaagggctatcatcttatgtccttccctcagtcagcacctcatggtgtagtcttcttgcatgtgacttatgtccctgcacaagaaaagaacttcacaactgctcctgccatttgtcatgatggaaaagcacactttcctcgtgaaggtgtctttgtttcaaatggcacacactggtttgtaacacaaaggaatttttatgaaccacaaatcattactacagacaacacatttgtgtctggtaactgtgatgttgtaataggaattgtcaacaacacagtttatgatcctttgcaacctgaattagactcattcaaggaggagttggataagtattttaagaatcatacatcaccagatgttgatttaggtgacatctctggcattaatgcttcagttgtaaacattcaaaaagaaattgaccgcctcaatgaggttgccaagaatttaaatgaatctctcatcgatctccaagaacttggaaagtatgagcagtacatcaagtggccatggtacatttggctaggttttatagctggcttgattgccatagtaatggtgacaattatgctttgctgtatgaccagttgctgtagttgtctcaagggctgttgttcttgtggatcctgctgcaaatttgatgaagacgactctgagccagtgctcaaaggagtcaaattacattacacataatgaccacctatagcaagtgatgtagtatttagtctatgattagttatagaaaaacattaggataaatacacatcctaggccgggccaaaatgtctctagacagattgaagctcaatgatgtctcaaacaaggatagcctgctgtccaactgcaaatacagtgttaccagatccacaggcgatgtaaccagtgtgtctggtcatgctatgcagaaagcccttgcaaggacactcggcatgttcttacttactgccttcaaccgttgcgaagaagtggcagaaatagggctccaatatgccatgtccttgctaggcagagatgatagcatcaagatattaagagaagccggctacaatgtaaaatgtgtggacacacagctcaaggactttacaatcaaattacaaggaaaggaatacaaaatacaagtcctagatatagtgggaatagatgcagccaatttagctgatctagagatacaagccagaggagtggtagcaaaagaactcaaaacaggagccaggctacctgacaatcggaggcatgatgcaccagattgtggtgtgatagttctctgtattgcagcattagttgtttccaaattagctgcaggggacaggggaggacttgatgctgtggaaagaagggctttaaatgtgctgaaagccgagaaagccaggtaccccaacatggaggtcaagcagatagctgaaagtttttatgatctgtttgaaaggaagccttattacattgatgtcttcatcacttttggcctggcccagtctagtgtcaagggaggcagcaaagttgaggggctgttttcaggtctcttcatgaatgcatacggggcaggacaagttatgctgaggtggggtttactggcaaaatctgtcaagaacatcatgctaggccatgctagtgtacaagctgagatggaacaggtggttgaggtttacgaatatgctcagaagcaaggaggggaggcaggattctatcacatcagaaataatccaaaagcttcacttctctctttgaccaattgtcctaatttcaccagtgttgtgcttggcaatgctgcaggtttaggcatcatagggtcatataagggtgctcctaggaatagagaactctttgatgctgccaaagattatgcagaaagattaaaggacaacaatgtaattaactacagtgcattaaacttgactgcagaagaaagagagctgatcagccagcagctgaacattgttgatgacactcctgatgatgatatttaattaaaactggaaaatgtaggataaatatggagaaattcgcccccgaatttgttggcgaggatgctaacaagaaggcagaggagtttctcaaacatagatccttcccttcggaaaaaccactagctggtataccgaacactgccactcatgtcaccaaatataacatgccccctatattgcgtagctcattcaaactcccttccccgagagttgctgcaaatcttactgaaccctctgctccccctaccactccaccacccacacctccccagaacaaggaagagcagcccaaagagtctgatgttgacattgagactatgcatgtctgtaaggttcctgacaatccggaacacagcaagaagccatgctgctcagatgataccgatactaagaaaactaggaagccgatggtcacctttgtggaacccgaggagaaatttgtcggattgggagctagcttgtacagggagaccatgcagacctttgctgctgatggttatgatgaagaaagcaacctatcgtttgaggagactaaccaagagccgggttcttcatctgtagaacaaagactagatagaatagaggagaaattgtcctacataataggccttttaaacaccataatggtagcgactgctggacctaccactgctagagatgagattagagatgcccttataggcactagagaagaacttattgagatgatcaagtctgacatcttgactgtcaatgacagaatagtggccatggagaagctcagagatgaggaatgctccagagctgacactgatgatggatcagcctgttatttaacagacagagcaaggatactagataagatagtgtccagcaatgctgaagaggctaaggaagatttggatgttgatgacatcatgggcattaatttttagttaattaaaataacaacaggacaaataatggaggcctacttggtagagatgtaccatggtgtcccatatacagctgcagtacagctaaacttggttgaaaaacattcagccaacatatcactaactgtgtggataccgatgtttcaaacatctctaccaaagaactccgttatggacctgctacatgatgttacagtcatttgtacacagatatcaacagtgcatggtcccatgatcaaggtagatctgagctcttccaatgcaggtttagctaccatgccaaggcaattcttgataaatgctatcatagctttggatgactggggcaacatggattacgaagtgcctgttgcttttgataaaaagagcttctgtgtgacaattcttaagcctaaaaacatgctttacactgtacccagcattactcccactaatcgacctactcatgagctgatagctgtctgctctttccataacagggtaacattaaagtcattcaatatacctgtcttcatcagagcactgtctatcagacagcaggaccttgatagtgtggagcaggctataagctccgatgtggaccatgctataacaacagctagggtggctccctatgcagggcttacacttgtgatcaacatcacatccaccaaaggagcattcaaactgctaaaggcaggtagtcagattcttgcagaactgggtccctatctgacgcaggtgagcctacatgatgtgattatgaactggaaacatacaggcacttcctacatactcaagagctcctcaacaagtggatgaaaaagagaaagtcaccattgatcagctcaatccacaactacaaccccacgatttcacacagcacaacaaccaccgccaccaacatccacatgacaaccacacatacacacccacatacatatatacacatatcttagttaaataaaatcaggataaataatggatcctaacatgacctcacaccagatcaccctcgagatcaacatgaccagcagccgtattggcacatacactacaccagccccaacagctcttctccttgcatgtgccgtcatcaacacagtgtgtgcgctgataatggcctgcagcagtagaagcactgccacatcaggcattgtcagcagccaatgcacagttcatcccaatcaccctccaccaagttatggcgtcaatgtaactggtctgccgggtaacctatactcaaggaacactacataacattataaataacagaaattatccttcaataaaccccaggccagacagctttaccctgctagacgattcaatcagcccttgcagtatgtcgtctagttaacaaaaaaccggtaggataagtactatcctattggaaccaaacgagacctgtagagcagctcacacaagagaaccacaagctgacttcacctagtatgggaaggaacttagaagtgagtggcagcattaccaatttgaactttgagagaactcagcatcctgacacatttaggactgttgtaaaagtgaaccaaatgtgtaagcttattgcaggtgtgctcacaagtgctgctgtggcagtttgtgtgggggtcataatgtattctgttttcacatcaaaccacaaggccaactccacgcagaatgccacgacccggaacagcacatccacccctccccaaccaaccgccggtctgcccaccacagagcaagggaccatccccagattcaccaaaccccccaccaaaaccgccacccaccatgagatcacagagcccgtcaaaatggcaacaccttcagaggatccctaccaatgctccagcaatggttatttggaccgacctgatttacctgaaaatttcaaactcgtattggatgttatatgcaagcctccaggtcctgaacatcacaacaccagctgttatgagaaacgtgaaatcaacccaggaagtgtttgccctgatcttgtaacaatgaaggcaaacatgggcttaaacaatggtggtggggaggatgctgcaccttatatagaggttaccaccctttctacgtactccaacaaaagggcaatgtgtgtccacaatgggtgtgatcaaggcttctgtttcttcctttctggtttaagcactgatcaggagagagctgtgctagagcttggaggtcaacaggctatcatggagttgcattatgattcctactggaaacactattggagtaactctaattgtgttgttcccagaacaaactgcaacctgacagaccaaactgagattttgtttcctaggtttaacaacaagaatcagtctcagtgtaccacctgtgcagattcagctggcctagataacaaattttatctcacatgtgatgggcttttaagaaccctccctctagttggactacccagcctaagtcctcaggcttacaaagctgtacccacacaaactacaggcaccaccacggcaccaacatcagagacgaggcacccaacccctgcacccaggaggtccaaacctctcagtcggaagaagagagctttatgtggtgtagactcaagcagagaacccaaaccaacaatgccttactggtgtcctatgctccaattatttccaaggaggtctaattcttaagtgacctattcctgaattaacttcagaataagtaccaaccttatcagtagttaatgaaaactaagctttgatataataggacaaatatgattcctggcaggatctttctagtccttctggtgatcttcaacaccaagccaattcacccaaatacattaacagaaaaattctatgagtccacatgtagtgttgagactgcaggttataagagtgcccttagaacaggttggcatatgacagttatgtcaattaagttgtctcaaataaatattgagtcatgcaagagcagcaactcgttattggctcatgagcttgcaatctatagtagtgcagtggatgaattgagaacgttatcatccaatgccttgaagtccaaaaggaagaagaggttcctcggtttgattcttggtctcggagctgcagtcactgccggggtggctttagccaagacagtgcaacttgaaagtgagattgcattgattagagatgcagtgagaaatacaaatgaggctgttgttagcctaaccaacggcatgtcagtgttggctaaagtggtggatgatttgaaaaacttcatatctaaagaattactcccaaaaataaaccgagtctcttgtgatgtgcacgacatcactgccgtcattagattccaacagctcaacaaaagacttttggaagtatctcgtgaattttcatctaatgcaggattaacacacactgtttcatcttttatgttaacagaccgggaactcacctccattgtaggcggcatggctgtttcagcaggccaaaaagagataatgctatctagcaaagctataatgagaagaaatgggttagcaatattaagttcagtcaacgctgacacactggtttatgtaatacaactcccattatttggtgttatggacacagattgttgggtaataagaagttctatagactgtcataacatagcagacaagtatgcttgtttggctagagctgataatggctggtattgtcacaatgctggctcattatcatacttcccgtcgccaacggattgtgagatccacaatgggtatgctttctgtgacactctaaaaagtctaactgtacctgtaacatcacgagaatgcaactcaaacatgtataccactaactacgattgtaagatttccacaagtaaaacttatgtgagtacagcggtactgactacaatgggttgcttggtatcttgttatggtcataacagttgcacagtcatcaataatgacaaaggtataataaggactctgccagatggttgccactacatctccaacaaaggtgtggacagggttcaagtaggtaacactgtttactatcttagcaaagaagttggcaagtcaattgttgtcagaggggaaccattggtcttgaaatatgaccctttgagtttccctgacgataaatttgatgttgctataagagatgtggagcatagcatcaatcagacacgcacattcttgaaggcctctgatcagttattggacttaagtgaaaacagagagaataaaaatttaaacaagtcatatatactaacaactctgctcttcgttgtaatgcttattataataatggctgtcatagggttcattctgtataaggtattgaaaatgatcagagacaacaagttgaaatccaaaagtacacctggcctcacagttttatcatgacaattgtaccaaaccataattgagttagttaattaaaaacttaggataagtgacaatccagacccaacacctctttcaactctcaaggataaggtaggatgagtgtgagaccttgcaaatttgaggttcaagggttttgttccagagggaggaattgcaagtatagtcataaatattgggaatggcctttgaaaactcttatgctcaggcagaactacatgcttaataggatttataggttcctcgacaccaacacagatgcaatgtcagatgtcagcggatttgatgcaccacaaaggactgctgagtatgccttgggaaccataggtgtgctgaaaagttacctggaaaaaactaacaacatcactaaatcaatagcttgtggcagtttgatcactgtattgcagaacttggatgttggtctagtaatacaagcaagagatagcaacactgaggacaccaattacttgagaagttgcaacactatactgtcttatatagacaagatacacaagaagagacaaattattcacattctcaaaagactgccagtaggagtactatgcaatctgatccaatctgtcatctccatcgaggagaagataaattcttctatgaaaacagaatgataaggctgcctaaatactatccagccatactgcataagatgtatattattagagtaaatagaaacctcacttacgatgggtctggaccatccacaataatagatgcaggaaagtctgtggtgtggaatcgtgttgatgtgatagcttgtgtgaaagaggccttgtgctgcatagaattcagctggaataaccaagtgatcatagactttgattatagccaggccagatgatgtggactgtattcctttttttgtcagtaatcagttattaacccaaaattgttaattatgtagactttaagttaactaacttcatgttaattcaatagttatataaaaaaatattcgaattaggatcaatatggatcctattgatgaacaagaagttaatgtgtacttgccggatagctacttaaagggtgttatatcttttagtgaaactaatgctcttggcagctgtatcattggtagacctttcttgaaggatgactttactgccactacttcaatccgtaaccccctaattgaacataaaagaataagggacactaaattagtaaaaaatattgtttcaaaccctcaatataggttagtggagcctctccaaatgcagcatgagctcttgagtgtactatcgcccaatttcatattgcacactgccaacttaaggaaaattatacaaagaagtgttgacataacagataaaaagttgaaccccattttgcacattttgaatcttaattctcctaaccaagagggtaaggtgtcggaacggctaactaggctaattaagaaacatctctctcacatacctaattgggtaagcagctggtacaatatatgggtcaatcttaacaacttactgcaggagtaccgttcaaaggaagttatagaccataactgtgttctgactaggcaattgtctggaagtttcatacatgtggtcatgagtcaatatggagttgtgataattagcaaaaaaagtaaaagatatacaatgtgtacttataaccaattcctaacctggaaggaccttgccttgagcagatttaatgccaattatgtggtctggctaagtaatgtgttaaacacactcaacgaggggttgggattaaggtgtagattaaaaggtcatctgctcagtaagttgtacatttccactgacatctttttatcttcaacatctaatgaattttataatgtggtcaaggaatttgagggcttcatcatgtcactgatattgaaacaaactgaggaagccttatttagcacaaggttttataataacatgttgaacaacttaattgatgccattgatagggctcgactagagtatctggcccgctgtgccaattcagctgccaggattaatttacctagtacagatgttatgatagcatcattgggtgatatcttatctttgataaacgttttaggtgaatccaaccttaacaacttaagtgagttatattttatcttcaggatatttggtcaccctatggttgatgagaggaaggccatggatgcagtcagagataactgttgtgaaacaaagtttctgacggctaagaaccttgcatcgttaagaggagcatatgtttatagaattatcaaaggattcgtagcaaattataacaggtggccttacataaaaactagagtttgccttacaccaacatggattaactatcttgacaccaattcatgtccctcattattagagatgacagaagatgattttattgtgttagctggagtgcactttataagagaattccacatcccaaagctaactgatctggagattatattaaatgacaaggccatatctcctccaaaatcactcatttggtcatgctttccaaaaaactacatacctcaggttatacaagatgagtatgcccggaggtattgtagagctaaagcacctttgaagacaagacgtgtcttggagttctacttacaggacaaggatttcaagttggatcagctccatagagtagtagtgaaccaggactaccttaatgataaagaacatataatttctttaacaggaaaagaaagagagttgggtgttggtaggatgtttgccatgcaacctgggaagcagaggcaagtccaaattttagcagagaagctgttggctgataacatcctgcaattctttccggagacactgactagatacggtgatttggagctgcaaaagatactagagttaaaagctggactttcaaataaaaatgacagatctaaagactcctacaataattatataagtaggtgctcattaattactgatttaagtaaatttaaccaagcttttaggtacgagtcatcctgtgtgtgtagtgatcttttagatgagctacatgggactcaaagcttattctcttggctgcatttaacagtaccactgactactataatgtgtacatataggcatgcgccgccggacactggaaacaactataatgtagatgatattgctgagcagagtggactctaccgctaccacatgggcgggattgagggctggtgccagaagctctggacaacagaggccattgctttgctagatactgtagctgtgaagggccgtttccagctaacttcattaataaatggcgacaaccaaagtattgatatttcaaaaccaacaaggctggggaccaggactcaaagtgaagcagattatgatttggcaataaattctttaagattaatatcagcagcttataaaggcattggacataaattaaaagaaggtgagacctacttgtcacgtgacatgcagttcatgagtaaaacaatacaacatgaaggggtctactacccggcctccatcaagaaaatattaagagttggtccctggatcaacacaatattagatgatataaaaacttcaacagaaagtattggttctctaactcaagaactagaatataaaggtgaaagtttaatgagcagcctgctgctgaggaacttctggctctacagattatattcagtggatttaaaagatcattctttgtgtggaaagcagctctacagatccttaataaaagtgttaaaacatttgaagaggtgcttcaacctggagaaccttggggaatgtttggaattatttttaaatgtgcccatgcagtttggaggtgctgacccaaatgtcatctacaggagcttctacagaagaactccagattttctaacagaaagtataactcatctcatcctcattttaaaacattttagaagagatttggaattcaacaaagataatgtctccaaagctgttctttctttgctagagttcaccaagaatgattctgcagaatttgtaactttgatgagagatcctcaagcaattggtagtgagaggcaggccaagatcacttcagacatcaacagaacagctgtaacttcagtgttatcaaatgctccaaatgaaatatttagaacttcagctcttcattacagcagcacagaaaatgaattaaatggaatagcaagtggagtttctcctgtttatcctcatggtcttcgagttttatatgaaagtttacctttttataaagcagagaagattgtcaacatggtttctgggaccaagtccatcaccaacatactggagaagacatcagccatctcctacacagatataattcgagccaccaacatgatggtggagaacctcactttgctaacaagaataatgaaaccaggtgctgacacatctttggatcctgacacaatagtaataacaatattatcaaaaataataagagataaatcctgggatgttggtgatataattggtgtcacttccccatctcctgtctcctgcttcaaggtggtctacacatcaactctacaaaataattcagtagtaatagaaagatacacaacagacacctacacaagaggtaagagaggccccaccaagccctgggtgggcagcagcacacaggagaagaagtccatgcctgtctacaacagacaagttttaacaagaggacaaagagatcaaatagaaaatatagcaaagctggagtgggtgttttcttcagtagcaaatattgattctttgctaaatgagctcagcaccatgactttgggtctttctctaaggaaatgtagacaactttttccaacatatttaagtttaaacttcctgcacaggctttctgtcagcagcaggcccagagaatatccttcttctcttcctgcctacaggacaacaaattttcattttgatactggaccaataaataaagtgttaacagaaagatttggagatgaagatataaatttggtatttcaaaatgcaatatcatatggtctttccaccatgtctttggtggagcagtttactggtgtctgtccaaataaagttttgctggtgcccaagctacaagaaatacaactaatgaaagttccaatatttcaaggtggcttcaacctacaaagtataattccaataataaggcagcagcacatgttcctgcccaaccacatcactccagcccagtatattgaattatttctttcttcaaaacaatttcattcaagaataaatttaaaacacaacaacagatttaaacttgttttacaaaaagattattttaatggggagaacatgatagaaactttgtccacctgtttggcaggccactggatcatcattttgatgctaatgaaggagagtcaggggatatttgacaaggagtggtatgatggttttgtaacagaccacatgttcctggacctgcagctcttcctctcctccttcaagacatttctaactgtcttcaactttgcttatttaaaagttggttcaaatatagaagaaataacaggaaatcaagccaacctgctggagctgctggacctgggctactggaagaacatgtataaagtattttcagagaccaaggtgcggctggctttgctaaaacaagatttatcatttaattctgtgaagaacagcagcagcttccggcactggtttataaattctctacaagaagtacaatgtacttctgtgccttgggtggtaaatgtaacaagaaatccaactcatttaaaaggtgttctacagtacatgaagatgatagaaagtggcatgattcaaggttattcagcaaatatttcttcagttttaagtatcccatataattatccagacatggcgcacatgatgacaaaaataataagaaatcgaggccacatgtcctatgattatccaaagatgaagaaaagtttaactttctccatgacagacatgagtgacagctacatgctcaacctcttccccaaagtagaatgttcttacatgagtggttatttggataaactagatgatactctacaacttctaaagaaacctcctgttggaagaaaagttccttctgtggctttgccctggcaccactgcaacagatacaactttgtcttcagcagcacaggctgcaaagtttctgtcattgacatgcttccaaaacatttccgaagaagtaatttaaaagtaatatgttttattggagaaggggcgggcaacctcatgctaagagctgttttggaagttggtggaaatataaaattaatatatagatccttaaaagatcctgatgatcatcatgttcctgtagaatttctaagattaaaaccttgttatccttatattgatactggtggcagtttatctttggcttcaacagatgccaccaacaaggcccactgggattatttacatcttcactggacagatcctttaaatttaatagtatgtgatgcagaaataagtggtgtgaagcactggctaaaaattcttcacaggtggtatgagcacatgacttcctgcaagcactgtttaaaatcagaacatgataaatatttaataataaaatatcatgctcaagatgatttaatagatcttcctcatggtgtcaggctactaaaatgtaacatctgcctgggctccaaactaagtggcagtgagagctacctgctcattggtcttggtctttcaaataaacttcctgtctacagtgaagttcttcattcaaaacttcttttggcagaatgtcatcagtttcatcatccaaaatatttggatgtttctggaataaatacaaatataaaatccttaataccaatgttggattatccaataacttacaacaagatcaccactttgctagaaagtgtgcgggagctttcttcaaataaaaacaagaacaccatgtggattggaagaaatcctgtctaccataataaatggctaaagaggaaatatttcaacattttaaaatggctaaaatactgtatagaacttcctgccttcaggatggattataattcatttgagagaatagaaatgctttatccaaatttaagagatttggtagattctgtttctacttcagagctgaagaaagtaataaaagtaacaggcatcctcttcaggagcaacaccatgtgaattaatatgccaatgctaacatgtcatccccactactttttttgttcaatcactctcagtctagacatgtgagaagatcccaaacccaactgcacccctcccactcgaaatcagttgtagcctcagcagctccatctgccatgatctctgaccagcagcaaatgtattattattttaatttgtctatagttaacaaaaaattgatatctcacaggttgtaaacatagttcttttataattattgttagttaaactattgtgtttgacttcctttgggtatttttttcccgtgggtcggcatggcatctccacctcctcgcggtccgacctgggcatccgaaggaggacgcacgtccactcggatggctaagggagagcctgcagtagcataaccccttggggcctctaaacgggtcttgaggggttttttgctgaaaggaggaactatatacgcgtcgacgggcccgcgctcactggccgtcgttttacaacgtcgtgactgggaaaaccctggcgttacccaacttaatcgccttgcagcacatccccctttcgccagctggcgtaatagcgaagaggcccgcaccgatcgcccttcccaacagttgcgcagcctgaatggcgaatgggacgcgccctgtagcggcgcattaagcgcggcgggtgtggtggttacgcgcagcgtgaccgctacacttgccagcgccctagcgcccgctcctttcgctttcttcccttcctttctcgccacgttcgccggctttccccgtcaagctctaaatcgggggctccctttagggttccgatttagtgctttacggcacctcgaccccaaaaaacttgattagggtgatggttcacgtagtgggccatcgccctgatagacggtttttcgccctttgacgttggagtccacgttctttaatagtggactcttgttccaaactggaacaacactcaaccctatctcggtctattcttttgatttataagggattttgccgatttcggcctattggttaaaaaatgagctgatttaacaaaaatttaacgcgaattttaacaaaatattaacgcttacaatttaggtggcacttttcggggaaatgtgcgcggaacccctatttgtttatttttctaaatacattcaaatatgtatccgctcatgagacaataaccctgataaatgcttcaataatattgaaaaaggaagagtatgagtattcaacatttccgtgtcgcccttattcccttttttgcggcattttgccttcctgtttttgctcacccagaaacgctggtgaaagtaaaagatgctgaagatcagttgggtgcacgagtgggttacatcgaactggatctcaacagcggtaagatccttgagagttttcgccccgaagaacgttttccaatgatgagcacttttaaagttctgctatgtggcgcggtattatcccgtattgacgccgggcaagagcaactcggtcgccgcatacactattctcagaatgacttggttgagtactcaccagtcacagaaaagcatcttacggatggcatgacagtaagagaattatgcagtgctgccataaccatgagtgataacactgcggccaacttacttctgacaacgatcggaggaccgaaggagctaaccgcttttttgcacaacatgggggatcatgtaactcgccttgatcgttgggaaccggagctgaatgaagccataccaaacgacgagcgtgacaccacgatgcctgtagcaatggcaacaacgttgcgcaaactattaactggcgaactacttactctagcttcccggcaacaattaatagactggatggaggcggataaagttgcaggaccacttctgcgctcggcccttccggctggctggtttattgctgataaatctggagccggtgagcgtgggtctcgcggtatcattgcagcactggggccagatggtaagccctcccgtatcgtagttatctacacgacggggagtcaggcaactatggatgaacgaaatagacagatcgctgagataggtgcctcactgattaagcattggtaactgtcagaccaagtttactcatatatactttagattgatttaaaacttcatttttaatttaaaaggatctaggtgaagatcctttttgataatctcatgaccaaaatcccttaacgtgagttttcgttccactgagcgtcagaccccgtagaaaagatcaaaggatcttcttgagatcctttttttctgcgcgtaatctgctgcttgcaaacaaaaaaaccaccgctaccagcggtggtttgtttgccggatcaagagctaccaactctttttccgaaggtaactggcttcagcagagcgcagataccaaatactgtccttctagtgtagccgtagttaggccaccacttcaagaactctgtagcaccgcctacatacctcgctctgctaatcctgttaccagtggctgctgccagtggcgataagtcgtgtcttaccgggttggactcaagacgatagttaccggataaggcgcagcggtcgggctgaacggggggttcgtgcacacagcccagcttggagcgaacgacctacaccgaactgagatacctacagcgtgagctatgagaaagcgccacgcttcccgaagggagaaaggcggacaggtatccggtaagcggcagggtcggaacaggagagcgcacgagggagcttccagggggaaacgcctggtatctttatagtcctgtcgggtttcgccacctctgacttgagcgtcgatttttgtgatgctcgtcaggggggcggagcctatggaaaaacgccagcaacgcggcctttttacggttcctggccttttgctggccttttgctcacatgttctttcctgcgttatcccctgattctgtggataaccgtattaccgcctttgagtgagctgataccgctcgccgcagccgaacgaccgagcgcagcgagtcagtgagcgaggaagcggaagagcgcccaatacgcaaaccgcctctccccgcgcgttggccgattcattaatgcagctggcacgacaggtttcccgactggaaagcgggcagtgagcgcaacgcaattaatgtgagttagctcactcattaggcaccccaggctttacactttatgcttccggctcgtatgttgtgtggaattgtgagcggataacaatttcacacaggaaacagctatgaccatgattacgccaagcgcgcccgggtaatacgactcactataggg

SEQ ID NO: 11 - DNA, 18762 bp, synthetic construct
  source 1..18762: mol_type = other DNA
acgcgaaaaaatgcataacaaaactatcaacctgaaaaaagttaggacaagtgaagattgctagtcccaaagaccagaatcatgggctgtaatgtgatgatggagcttgattatggtggacgagctgcatggctggcattccacataaccaactttgataggtcagatttggaaactatcctaagaggtgctagggtgtgcaatacatggcaagatcagagactctccgtgtaccttgtgggaagggattgcaatttgttaagaccatttgtgcaagctgccaaatttatccataatactaggagaggccaaacattaacacattggttcacaaaaaatatcgtgtttagttctacagggcaagagacagagcctcccattgaccccacatgtgagctgttggtagagctgatcagtggttaagatgacagcacattatgtagttaattaaaacaaagggtaggacaagtcctaatgtccacagctatgaacaagttcactcagaccatctctaaacctgccactatcttgaatatttcagacagtgaagagtcgggcgatgaggcaggggtgggcaaggtgtcccgtaccacacagagctcagagaggtggcttgatttgctcattgaaaagttccagccgagcctacaaaacatcactagatacatcaactggaacttcatcaggatctgcaatgataggcttaaaaaagaaaaaatggggtacattgaggccaagcaatatgtggaagacatggcttggatggtgatagcatctgaggcagacagcattgagtggaagtgcataaggaggcaggagaaagtgactggggtgaaatacccaaagttcttctttgtacaacacaaagaggactggattgagtgcacaggatgcattccgtacccaggccatgacttgatctatgatgaggatgatgatgactgagctgactcagatcactccaaccagcagagagatccatagttatagaaaaacattaggataaatacacatcctaggccgccaccatgttcgtgtttctggtgctgctgcctctggtgagctcccagtgcgtgaacctgaccacaaggacccagctgccccctgcctataccaattccttcacacggggcgtgtactatcccgacaaggtgtttagatctagcgtgctgcactccacacaggatctgtttctgcctttcttttctaacgtgacctggttccacgccatccacgtgagcggcaccaatggcacaaagcggttcgacaatccagtgctgccctttaacgatggcgtgtacttcgcctccaccgagaagtctaacatcatcagaggctggatctttggcaccacactggacagcaagacacagtccctgctgatcgtgaacaatgccaccaacgtggtcatcaaggtgtgcgagttccagttttgtaatgatccattcctgggcgtgtactatcacaagaacaataagtcttggatggagagcgagtttcgcgtgtattcctctgccaacaattgcacatttgagtacgtgtcccagcccttcctgatggacctggagggcaagcagggcaatttcaagaacctgagggagttcgtgtttaagaatatcgatggctacttcaagatctactccaagcacaccccaatcaacctggtgcgcgacctgccacagggcttctctgccctggagccactggtggatctgcccatcggcatcaacatcacccggtttcagacactgctggccctgcacagaagctacctgacaccaggcgacagctcctctggatggaccgcaggagctgccgcctactatgtgggctatctgcagcccaggaccttcctgctgaagtacaacgagaatggcaccatcacagacgccgtggattgcgccctggatcccctgtctgagaccaagtgtacactgaagagctttaccgtggagaagggcatctatcagacaagcaatttcagggtgcagcctaccgagtccatcgtgcgctttcccaatatcacaaacctgtgcccttttggcgaggtgttcaacgcaacccgcttcgccagcgtgtacgcctggaataggaagcgcatctccaactgcgtggccgactattctgtgctgtacaacagcgcctccttctctacctttaagtgctatggcgtgagccccacaaagctgaatgacctgtgctttaccaacgtgtacgccgattccttcgtgatcaggggcgacgaggtgcgccagatcgcccctggccagacaggcaagatcgccgactacaattataagctgcctgacgatttcaccggctgcgtgatcgcctggaactctaacaatctggatagcaaagtgggcggcaactacaattatctgtaccggctgtttagaaagtctaatctgaagccattcgagagggacatctccacagagatctaccaggccggctctaccccctgcaatggcgtggagggctttaactgttatttccctctgcagagctacggcttccagccaacaaacggcgtgggctatcagccctaccgcgtggtggtgctgtcttttgagctgctgcacgcacctgcaacagtgtgcggaccaaagaagagcaccaatctggtgaagaacaagtgcgtgaacttcaacttcaacggactgaccggcacaggcgtgctgaccgagtccaacaagaagttcctgccttttcagcagttcggcagggacatcgcagataccacagacgccgtgcgcgaccctcagaccctggagatcctggatatcacaccatgctccttcggcggcgtgtctgtgatcacaccaggcaccaatacaagcaaccaggtggccgtgctgtatcaggacgtgaattgtaccgaggtgcccgtggcaatccacgcagatcagctgacccctacatggcgggtgtactctaccggcagcaacgtgttccagacaagagccggatgcctgatcggagccgagcacgtgaacaatagctatgagtgcgacatccctatcggcgccggcatctgtgcctcctaccagacccagacaaactccccagggtctgcctcctctgtggccagccagtccatcatcgcctataccatgagcctgggcgccgagaattccgtggcctactccaacaattctatcgccatccctaccaacttcacaatctccgtgaccacagagatcctgccagtgagcatgaccaagacatccgtggactgcacaatgtatatctgtggcgattccaccgagtgctctaacctgctgctgcagtacggctctttttgtacccagctgaatagagccctgacaggcatcgccgtggagcaggacaagaacacacaggaggtgttcgcccaggtgaagcagatctacaagaccccacccatcaaggactttggcggcttcaacttcagccagatcctgcccgatcctagcaagccatccaagcggtcttttatcgaggacctgctgttcaacaaggtgaccctggccgatgccggcttcatcaagcagtatggcgattgcctgggcgacatcgccgccagagacctgatctgtgcccagaagtttaatggcctgaccgtgctgcctccactgctgacagatgagatgatcgcccagtacacatctgccctgctggccggcaccatcacaagcggatggaccttcggcgcaggagccgccctgcagatcccctttgccatgcagatggcctatcggttcaacggcatcggcgtgacccagaatgtgctgtacgagaaccagaagctgatcgccaatcagtttaactccgccatcggcaagatccaggactctctgagctccacagccagcgccctgggcaagctgcaggatgtggtgaatcagaacgcccaggccctgaataccctggtgaagcagctgtctagcaacttcggcgccatctcctctgtgctgaatgatatcctgagcaggctggaccctccagaggcagaggtgcagatcgaccggctgatcacaggcagactgcagtccctgcagacctacgtgacacagcagctgatcagggcagcagagatcagggcctctgccaatctggccgccaccaagatgagcgagtgcgtgctgggccagtccaagagagtggacttttgtggcaagggctatcacctgatgagcttcccacagtccgcccctcacggagtggtgtttctgcacgtgacctacgtgccagcccaggagaagaacttcaccacagcaccagcaatctgccacgatggcaaggcacactttcctagggagggcgtgttcgtgagcaacggcacccactggtttgtgacacagcgcaatttctacgagccacagatcatcaccacagacaatacattcgtgtccggcaactgtgacgtggtcatcggcatcgtgaacaataccgtgtatgatcctctgcagccagagctggactcttttaaggaggagctggataagtacttcaagaatcacaccagccccgacgtggatctgggcgacatctctggcatcaatgccagcgtggtgaacatccagaaggagatcgacaggctgaacgaggtggccaagaatctgaacgagtccctgatcgatctgcaggagctgggcaagtatgagcagtacatcaagtggccctggtatatctggctgggcttcatcgccggcctgatcgccatcgtgatggtgaccatcatgctgtgctgtatgacaagctgctgttcctgcctgaagggctgctgttcttgtggcagctgctgtaagtttgatgaggacgatagcgagcctgtgctgaagggcgtgaagctgcactacacctgatagccacctatagcaagtgatgtagtatttagtctatgattagttatagaaaaacattaggataaatacacatcctaggccgggccaaaatgtctctagacagattgaagctcaatgatgtctcaaacaaggatagcctgctgtccaactgcaaatacagtgttaccagatccacaggcgatgtaaccagtgtgtctggtcatgctatgcagaaagcccttgcaaggacactcggcatgttcttacttactgccttcaaccgttgcgaagaagtggcagaaatagggctccaatatgccatgtccttgctaggcagagatgatagcatcaagatattaagagaagccggctacaatgtaaaatgtgtggacacacagctcaaggactttacaatcaaattacaaggaaaggaatacaaaatacaagtcctagatatagtgggaatagatgcagccaatttagctgatctagagatacaagccagaggagtggtagcaaaagaactcaaaacaggagccaggctacctgacaatcggaggcatgatgcaccagattgtggtgtgatagttctctgtattgcagcattagttgtttccaaattagctgcaggggacaggggaggacttgatgctgtggaaagaagggctttaaatgtgctgaaagccgagaaagccaggtaccccaacatggaggtcaagcagatagctgaaagtttttatgatctgtttgaaaggaagccttattacattgatgtcttcatcacttttggcctggcccagtctagtgtcaagggaggcagcaaagttgaggggctgttttcaggtctcttcatgaatgcatacggggcaggacaagttatgctgaggtggggtttactggcaaaatctgtcaagaacatcatgctaggccatgctagtgtacaagctgagatggaacaggtggttgaggtttacgaatatgctcagaagcaaggaggggaggcaggattctatcacatcagaaataatccaaaagcttcacttctctctttgaccaattgtcctaatttcaccagtgttgtgcttggcaatgctgcaggtttaggcatcatagggtcatataagggtgctcctaggaatagagaactctttgatgctgccaaagattatgcagaaagattaaaggacaacaatgtaattaactacagtgcattaaacttgactgcagaagaaagagagctgatcagccagcagctgaacattgttgatgacactcctgatgatgatatttaattaaaactggaaaatgtaggataaatatggagaaattcgcccccgaatttgttggcgaggatgctaacaagaaggcagaggagtttctcaaacatagatccttcccttcggaaaaaccactagctggtataccgaacactgccactcatgtcaccaaatataacatgccccctatattgcgtagctcattcaaactcccttccccgagagttgctgcaaatcttactgaaccctctgctccccctaccactccaccacccacacctccccagaacaaggaagagcagcccaaagagtctgatgttgacattgagactatgcatgtctgtaaggttcctgacaatccggaacacagcaagaagccatgctgctcagatgataccgatactaagaaaactaggaagccgatggtcacctttgtggaacccgaggagaaatttgtcggattgggagctagcttgtacagggagaccatgcagacctttgctgctgatggttatgatgaagaaagcaacctatcgtttgaggagactaaccaagagccgggttcttcatctgtagaacaaagactagatagaatagaggagaaattgtcctacataataggccttttaaacaccataatggtagcgactgctggacctaccactgctagagatgagattagagatgcccttataggcactagagaagaacttattgagatgatcaagtctgacatcttgactgtcaatgacagaatagtggccatggagaagctcagagatgaggaatgctccagagctgacactgatgatggatcagcctgttatttaacagacagagcaaggatactagataagatagtgtccagcaatgctgaagaggctaaggaagatttggatgttgatgacatcatgggcattaatttttagttaattaaaataacaacaggacaaataatggaggcctacttggtagagatgtaccatggtgtcccatatacagctgcagtacagctaaacttggttgaaaaacattcagccaacatatcactaactgtgtggataccgatgtttcaaacatctctaccaaagaactccgttatggacctgctacatgatgttacagtcatttgtacacagatatcaacagtgcatggtcccatgatcaaggtagatctgagctcttccaatgcaggtttagctaccatgccaaggcaattcttgataaatgctatcatagctttggatgactggggcaacatggattacgaagtgcctgttgcttttgataaaaagagcttctgtgtgacaattcttaagcctaaaaacatgctttacactgtacccagcattactcccactaatcgacctactcatgagctgatagctgtctgctctttccataacagggtaacattaaagtcattcaatatacctgtcttcatcagagcactgtctatcagacagcaggaccttgatagtgtggagcaggctataagctccgatgtggaccatgctataacaacagctagggtggctccctatgcagggcttacacttgtgatcaacatcacatccaccaaaggagcattcaaactgctaaaggcaggtagtcagattcttgcagaactgggtccctatctgacgcaggtgagcctacatgatgtgattatgaactggaaacatacaggcacttcctacatactcaagagctcctcaacaagtggatgaaaaagagaaagtcaccattgatcagctcaatccacaactacaaccccacgatttcacacagcacaacaaccaccgccaccaacatccacatgacaaccacacatacacacccacatacatatatacacatatcttagttaaataaaatcaggataaataatggatcctaacatgacctcacaccagatcaccctcgagatcaacatgaccagcagccgtattggcacatacactacaccagccccaacagctcttctccttgcatgtgccgtcatcaacacagtgtgtgcgctgataatggcctgcagcagtagaagcactgccacatcaggcattgtcagcagccaatgcacagttcatcccaatcaccctccaccaagttatggcgtcaatgtaactggtctgccgggtaacctatactcaaggaacactacataacattataaataacagaaattatccttcaataaaccccaggccagacagctttaccctgctagacgattcaatcagcccttgcagtatgtcgtctagttaacaaaaaaccggtaggataagtactatcctattggaaccaaacgagacctgtagagcagctcacacaagagaaccacaagctgacttcacctagtatgggaaggaacttagaagtgagtggcagcattaccaatttgaactttgagagaactcagcatcctgacacatttaggactgttgtaaaagtgaaccaaatgtgtaagcttattgcaggtgtgctcacaagtgctgctgtggcagtttgtgtgggggtcataatgtattctgttttcacatcaaaccacaaggccaactccacgcagaatgccacgacccggaacagcacatccacccctccccaaccaaccgccggtctgcccaccacagagcaagggaccatccccagattcaccaaaccccccaccaaaaccgccacccaccatgagatcacagagcccgtcaaaatggcaacaccttcagaggatccctaccaatgctccagcaatggttatttggaccgacctgatttacctgaaaatttcaaactcgtattggatgttatatgcaagcctccaggtcctgaacatcacaacaccagctgttatgagaaacgtgaaatcaacccaggaagtgtttgccctgatcttgtaacaatgaaggcaaacatgggcttaaacaatggtggtggggaggatgctgcaccttatatagaggttaccaccctttctacgtactccaacaaaagggcaatgtgtgtccacaatgggtgtgatcaaggcttctgtttcttcctttctggtttaagcactgatcaggagagagctgtgctagagcttggaggtcaacaggctatcatggagttgcattatgattcctactggaaacactattggagtaactctaattgtgttgttcccagaacaaactgcaacctgacagaccaaactgagattttgtttcctaggtttaacaacaagaatcagtctcagtgtaccacctgtgcagattcagctggcctagataacaaattttatctcacatgtgatgggcttttaagaaccctccctctagttggactacccagcctaagtcctcaggcttacaaagctgtacccacacaaactacaggcaccaccacggcaccaacatcagagacgaggcacccaacccctgcacccaggaggtccaaacctctcagtcggaagaagagagctttatgtggtgtagactcaagcagagaacccaaaccaacaatgccttactggtgtcctatgctccaattatttccaaggaggtctaattcttaagtgacctattcctgaattaacttcagaataagtaccaaccttatcagtagttaatgaaaactaagctttgatataataggacaaatatgattcctggcaggatctttctagtccttctggtgatcttcaacaccaagccaattcacccaaatacattaacagaaaaattctatgagtccacatgtagtgttgagactgcaggttataagagtgcccttagaacaggttggcatatgacagttatgtcaattaagttgtctcaaataaatattgagtcatgcaagagcagcaactcgttattggctcatgagcttgcaatctatagtagtgcagtggatgaattgagaacgttatcatccaatgccttgaagtccaaaaggaagaagaggttcctcggtttgattcttggtctcggagctgcagtcactgccggggtggctttagccaagacagtgcaacttgaaagtgagattgcattgattagagatgcagtgagaaatacaaatgaggctgttgttagcctaaccaacggcatgtcagtgttggctaaagtggtggatgatttgaaaaacttcatatctaaagaattactcccaaaaataaaccgagtctcttgtgatgtgcacgacatcactgccgtcattagattccaacagctcaacaaaagacttttggaagtatctcgtgaattttcatctaatgcaggattaacacacactgtttcatcttttatgttaacagaccgggaactcacctccattgtaggcggcatggctgtttcagcaggccaaaaagagataatgctatctagcaaagctataatgagaagaaatgggttagcaatattaagttcagtcaacgctgacacactggtttatgtaatacaactcccattatttggtgttatggacacagattgttgggtaataagaagttctatagactgtcataacatagcagacaagtatgcttgtttggctagagctgataatggctggtattgtcacaatgctggctcattatcatacttcccgtcgccaacggattgtgagatccacaatgggtatgctttctgtgacactctaaaaagtctaactgtacctgtaacatcacgagaatgcaactcaaacatgtataccactaactacgattgtaagatttccacaagtaaaacttatgtgagtacagcggtactgactacaatgggttgcttggtatcttgttatggtcataacagttgcacagtcatcaataatgacaaaggtataataaggactctgccagatggttgccactacatctccaacaaaggtgtggacagggttcaagtaggtaacactgtttactatcttagcaaagaagttggcaagtcaattgttgtcagaggggaaccattggtcttgaaatatgaccctttgagtttccctgacgataaatttgatgttgctataagagatgtggagcatagcatcaatcagacacgcacattcttgaaggcctctgatcagttattggacttaagtgaaaacagagagaataaaaatttaaacaagtcatatatactaacaactctgctcttcgttgtaatgcttattataataatggctgtcatagggttcattctgtataaggtattgaaaatgatcagagacaacaagttgaaatccaaaagtacacctggcctcacagttttatcatgacaattgtaccaaaccataattgagttagttaattaaaaacttaggataagtgacaatccagacccaacacctctttcaactctcaaggataaggtaggatgagtgtgagaccttgcaaatttgaggttcaagggttttgttccagagggaggaattgcaagtatagtcataaatattgggaatggcctttgaaaactcttatgctcaggcagaactacatgcttaataggatttataggttcctcgacaccaacacagatgcaatgtcagatgtcagcggatttgatgcaccacaaaggactgctgagtatgccttgggaaccataggtgtgctgaaaagttacctggaaaaaactaacaacatcactaaatcaatagcttgtggcagtttgatcactgtattgcagaacttggatgttggtctagtaatacaagcaagagatagcaacactgaggacaccaattacttgagaagttgcaacactatactgtcttatatagacaagatacacaagaagagacaaattattcacattctcaaaagactgccagtaggagtactatgcaatctgatccaatctgtcatctccatcgaggagaagataaattcttctatgaaaacagaatgataaggctgcctaaatactatccagccatactgcataagatgtatattattagagtaaatagaaacctcacttacgatgggtctggaccatccacaataatagatgcaggaaagtctgtggtgtggaatcgtgttgatgtgatagcttgtgtgaaagaggccttgtgctgcatagaattcagctggaataaccaagtgatcatagactttgattatagccaggccagatgatgtggactgtattcctttttttgtcagtaatcagttattaacccaaaattgttaattatgtagactttaagttaactaacttcatgttaattcaatagttatataaaaaaatattcgaattaggatcaatatggatcctattgatgaacaagaagttaatgtgtacttgccggatagctacttaaagggtgttatatcttttagtgaaactaatgctcttggcagctgtatcattggtagacctttcttgaaggatgactttactgccactacttcaatccgtaaccccctaattgaacataaaagaataagggacactaaattagtaaaaaatattgtttcaaaccctcaatataggttagtggagcctctccaaatgcagcatgagctcttgagtgtactatcgcccaatttcatattgcacactgccaacttaaggaaaattatacaaagaagtgttgacataacagataaaaagttgaaccccattttgcacattttgaatcttaattctcctaaccaagagggtaaggtgtcggaacggctaactaggctaattaagaaacatctctctcacatacctaattgggtaagcagctggtacaatatatgggtcaatcttaacaacttactgcaggagtaccgttcaaaggaagttatagaccataactgtgttctgactaggcaattgtctggaagtttcatacatgtggtcatgagtcaatatggagttgtgataattagcaaaaaaagtaaaagatatacaatgtgtacttataaccaattcctaacctggaaggaccttgccttgagcagatttaatgccaattatgtggtctggctaagtaatgtgttaaacacactcaacgaggggttgggattaaggtgtagattaaaaggtcatctgctcagtaagttgtacatttccactgacatctttttatcttcaacatctaatgaattttataatgtggtcaaggaatttgagggcttcatcatgtcactgatattgaaacaaactgaggaagccttatttagcacaaggttttataataacatgttgaacaacttaattgatgccattgatagggctcgactagagtatctggcccgctgtgccaattcagctgccaggattaatttacctagtacagatgttatgatagcatcattgggtgatatcttatctttgataaacgttttaggtgaatccaaccttaacaacttaagtgagttatattttatcttcaggatatttggtcaccctatggttgatgagaggaaggccatggatgcagtcagagataactgttgtgaaacaaagtttctgacggctaagaaccttgcatcgttaagaggagcatatgtttatagaattatcaaaggattcgtagcaaattataacaggtggccttacataaaaactagagtttgccttacaccaacatggattaactatcttgacaccaattcatgtccctcattattagagatgacagaagatgattttattgtgttagctggagtgcactttataagagaattccacatcccaaagctaactgatctggagattatattaaatgacaaggccatatctcctccaaaatcactcatttggtcatgctttccaaaaaactacatacctcaggttatacaagatgagtatgcccggaggtattgtagagctaaagcacctttgaagacaagacgtgtcttggagttctacttacaggacaaggatttcaagttggatcagctccatagagtagtagtgaaccaggactaccttaatgataaagaacatataatttctttaacaggaaaagaaagagagttgggtgttggtaggatgtttgccatgcaacctgggaagcagaggcaagtccaaattttagcagagaagctgttggctgataacatcctgcaattctttccggagacactgactagatacggtgatttggagctgcaaaagatactagagttaaaagctggactttcaaataaaaatgacagatctaaagactcctacaataattatataagtaggtgctcattaattactgatttaagtaaatttaaccaagcttttaggtacgagtcatcctgtgtgtgtagtgatcttttagatgagctacatgggactcaaagcttattctcttggctgcatttaacagtaccactgactactataatgtgtacatataggcatgcgccgccggacactggaaacaactataatgtagatgatattgctgagcagagtggactctaccgctaccacatgggcgggattgagggctggtgccagaagctctggacaacagaggccattgctttgctagatactgtagctgtgaagggccgtttccagctaacttcattaataaatggcgacaaccaaagtattgatatttcaaaaccaacaaggctggggaccaggactcaaagtgaagcagattatgatttggcaataaattctttaagattaatatcagcagcttataaaggcattggacataaattaaaagaaggtgagacctacttgtcacgtgacatgcagttcatgagtaaaacaatacaacatgaaggggtctactacccggcctccatcaagaaaatattaagagttggtccctggatcaacacaatattagatgatataaaaacttcaacagaaagtattggttctctaactcaagaactagaatataaaggtgaaagtttaatgagcagcctgctgctgaggaacttctggctctacagattatattcagtggatttaaaagatcattctttgtgtggaaagcagctctacagatccttaataaaagtgttaaaacatttgaagaggtgcttcaacctggagaaccttggggaatgtttggaattatttttaaatgtgcccatgcagtttggaggtgctgacccaaatgtcatctacaggagcttctacagaagaactccagattttctaacagaaagtataactcatctcatcctcattttaaaacattttagaagagatttggaattcaacaaagataatgtctccaaagctgttctttctttgctagagttcaccaagaatgattctgcagaatttgtaactttgatgagagatcctcaagcaattggtagtgagaggcaggccaagatcacttcagacatcaacagaacagctgtaacttcagtgttatcaaatgctccaaatgaaatatttagaacttcagctcttcattacagcagcacagaaaatgaattaaatggaatagcaagtggagtttctcctgtttatcctcatggtcttcgagttttatatgaaagtttacctttttataaagcagagaagattgtcaacatggtttctgggaccaagtccatcaccaacatactggagaagacatcagccatctcctacacagatataattcgagccaccaacatgatggtggagaacctcactttgctaacaagaataatgaaaccaggtgctgacacatctttggatcctgacacaatagtaataacaatattatcaaaaataataagagataaatcctgggatgttggtgatataattggtgtcacttccccatctcctgtctcctgcttcaaggtggtctacacatcaactctacaaaataattcagtagtaatagaaagatacacaacagacacctacacaagaggtaagagaggccccaccaagccctgggtgggcagcagcacacaggagaagaagtccatgcctgtctacaacagacaagttttaacaagaggacaaagagatcaaatagaaaatatagcaaagctggagtgggtgttttcttcagtagcaaatattgattctttgctaaatgagctcagcaccatgactttgggtctttctctaaggaaatgtagacaactttttccaacatatttaagtttaaacttcctgcacaggctttctgtcagcagcaggcccagagaatatccttcttctcttcctgcctacaggacaacaaattttcattttgatactggaccaataaataaagtgttaacagaaagatttggagatgaagatataaatttggtatttcaaaatgcaatatcatatggtctttccaccatgtctttggtggagcagtttactggtgtctgtccaaataaagttttgctggtgcccaagctacaagaaatacaactaatgaaagttccaatatttcaaggtggcttcaacctacaaagtataattccaataataaggcagcagcacatgttcctgcccaaccacatcactccagcccagtatattgaattatttctttcttcaaaacaatttcattcaagaataaatttaaaacacaacaacagatttaaacttgttttacaaaaagattattttaatggggagaacatgatagaaactttgtccacctgtttggcaggccactggatcatcattttgatgctaatgaaggagagtcaggggatatttgacaaggagtggtatgatggttttgtaacagaccacatgttcctggacctgcagctcttcctctcctccttcaagacatttctaactgtcttcaactttgcttatttaaaagttggttcaaatatagaagaaataacaggaaatcaagccaacctgctggagctgctggacctgggctactggaagaacatgtataaagtattttcagagaccaaggtgcggctggctttgctaaaacaagatttatcatttaattctgtgaagaacagcagcagcttccggcactggtttataaattctctacaagaagtacaatgtacttctgtgccttgggtggtaaatgtaacaagaaatccaactcatttaaaaggtgttctacagtacatgaagatgatagaaagtggcatgattcaaggttattcagcaaatatttcttcagttttaagtatcccatataattatccagacatggcgcacatgatgacaaaaataataagaaatcgaggccacatgtcctatgattatccaaagatgaagaaaagtttaactttctccatgacagacatgagtgacagctacatgctcaacctcttccccaaagtagaatgttcttacatgagtggttatttggataaactagatgatactctacaacttctaaagaaacctcctgttggaagaaaagttccttctgtggctttgccctggcaccactgcaacagatacaactttgtcttcagcagcacaggctgcaaagtttctgtcattgacatgcttccaaaacatttccgaagaagtaatttaaaagtaatatgttttattggagaaggggcgggcaacctcatgctaagagctgttttggaagttggtggaaatataaaattaatatatagatccttaaaagatcctgatgatcatcatgttcctgtagaatttctaagattaaaaccttgttatccttatattgatactggtggcagtttatctttggcttcaacagatgccaccaacaaggcccactgggattatttacatcttcactggacagatcctttaaatttaatagtatgtgatgcagaaataagtggtgtgaagcactggctaaaaattcttcacaggtggtatgagcacatgacttcctgcaagcactgtttaaaatcagaacatgataaatatttaataataaaatatcatgctcaagatgatttaatagatcttcctcatggtgtcaggctactaaaatgtaacatctgcctgggctccaaactaagtggcagtgagagctacctgctcattggtcttggtctttcaaataaacttcctgtctacagtgaagttcttcattcaaaacttcttttggcagaatgtcatcagtttcatcatccaaaatatttggatgtttctggaataaatacaaatataaaatccttaataccaatgttggattatccaataacttacaacaagatcaccactttgctagaaagtgtgcgggagctttcttcaaataaaaacaagaacaccatgtggattggaagaaatcctgtctaccataataaatggctaaagaggaaatatttcaacattttaaaatggctaaaatactgtatagaacttcctgccttcaggatggattataattcatttgagagaatagaaatgctttatccaaatttaagagatttggtagattctgtttctacttcagagctgaagaaagtaataaaagtaacaggcatcctcttcaggagcaacaccatgtgaattaatatgccaatgctaacatgtcatccccactactttttttgttcaatcactctcagtctagacatgtgagaagatcccaaacccaactgcacccctcccactcgaaatcagttgtagcctcagcagctccatctgccatgatctctgaccagcagcaaatgtattattattttaatttgtctatagttaacaaaaaattgatatctcacaggttgtaaacatagttcttttataattattgttagttaaactattgtgtttgacttcctttgggtatttttttcccgt

SEQ ID NO: 12 - DNA, 21754 bp, synthetic construct
  source 1..21754: mol_type = other DNA
acgcgaaaaaatgcataacaaaactatcaacctgaaaaaagttaggacaagtgaagattgctagtcccaaagaccagaatcatgggctgtaatgtgatgatggagcttgattatggtggacgagctgcatggctggcattccacataaccaactttgataggtcagatttggaaactatcctaagaggtgctagggtgtgcaatacatggcaagatcagagactctccgtgtaccttgtgggaagggattgcaatttgttaagaccatttgtgcaagctgccaaatttatccataatactaggagaggccaaacattaacacattggttcacaaaaaatatcgtgtttagttctacagggcaagagacagagcctcccattgaccccacatgtgagctgttggtagagctgatcagtggttaagatgacagcacattatgtagttaattaaaacaaagggtaggacaagtcctaatgtccacagctatgaacaagttcactcagaccatctctaaacctgccactatcttgaatatttcagacagtgaagagtcgggcgatgaggcaggggtgggcaaggtgtcccgtaccacacagagctcagagaggtggcttgatttgctcattgaaaagttccagccgagcctacaaaacatcactagatacatcaactggaacttcatcaggatctgcaatgataggcttaaaaaagaaaaaatggggtacattgaggccaagcaatatgtggaagacatggcttggatggtgatagcatctgaggcagacagcattgagtggaagtgcataaggaggcaggagaaagtgactggggtgaaatacccaaagttcttctttgtacaacacaaagaggactggattgagtgcacaggatgcattccgtacccaggccatgacttgatctatgatgaggatgatgatgactgagctgactcagatcactccaaccagcagagagatccatagttatagaaaaacattaggataaatacacatcctaggccgccaccatgttcgtgtttctggtgctgctgcctctggtgagctcccagtgcgtgaacctgaccacaaggacccagctgccccctgcctataccaattccttcacacggggcgtgtactatcccgacaaggtgtttagatctagcgtgctgcactccacacaggatctgtttctgcctttcttttctaacgtgacctggttccacgccatccacgtgagcggcaccaatggcacaaagcggttcgacaatccagtgctgccctttaacgatggcgtgtacttcgcctccaccgagaagtctaacatcatcagaggctggatctttggcaccacactggacagcaagacacagtccctgctgatcgtgaacaatgccaccaacgtggtcatcaaggtgtgcgagttccagttttgtaatgatccattcctgggcgtgtactatcacaagaacaataagtcttggatggagagcgagtttcgcgtgtattcctctgccaacaattgcacatttgagtacgtgtcccagcccttcctgatggacctggagggcaagcagggcaatttcaagaacctgagggagttcgtgtttaagaatatcgatggctacttcaagatctactccaagcacaccccaatcaacctggtgcgcgacctgccacagggcttctctgccctggagccactggtggatctgcccatcggcatcaacatcacccggtttcagacactgctggccctgcacagaagctacctgacaccaggcgacagctcctctggatggaccgcaggagctgccgcctactatgtgggctatctgcagcccaggaccttcctgctgaagtacaacgagaatggcaccatcacagacgccgtggattgcgccctggatcccctgtctgagaccaagtgtacactgaagagctttaccgtggagaagggcatctatcagacaagcaatttcagggtgcagcctaccgagtccatcgtgcgctttcccaatatcacaaacctgtgcccttttggcgaggtgttcaacgcaacccgcttcgccagcgtgtacgcctggaataggaagcgcatctccaactgcgtggccgactattctgtgctgtacaacagcgcctccttctctacctttaagtgctatggcgtgagccccacaaagctgaatgacctgtgctttaccaacgtgtacgccgattccttcgtgatcaggggcgacgaggtgcgccagatcgcccctggccagacaggcaagatcgccgactacaattataagctgcctgacgatttcaccggctgcgtgatcgcctggaactctaacaatctggatagcaaagtgggcggcaactacaattatctgtaccggctgtttagaaagtctaatctgaagccattcgagagggacatctccacagagatctaccaggccggctctaccccctgcaatggcgtggagggctttaactgttatttccctctgcagagctacggcttccagccaacaaacggcgtgggctatcagccctaccgcgtggtggtgctgtcttttgagctgctgcacgcacctgcaacagtgtgcggaccaaagaagagcaccaatctggtgaagaacaagtgcgtgaacttcaacttcaacggactgaccggcacaggcgtgctgaccgagtccaacaagaagttcctgccttttcagcagttcggcagggacatcgcagataccacagacgccgtgcgcgaccctcagaccctggagatcctggatatcacaccatgctccttcggcggcgtgtctgtgatcacaccaggcaccaatacaagcaaccaggtggccgtgctgtatcaggacgtgaattgtaccgaggtgcccgtggcaatccacgcagatcagctgacccctacatggcgggtgtactctaccggcagcaacgtgttccagacaagagccggatgcctgatcggagccgagcacgtgaacaatagctatgagtgcgacatccctatcggcgccggcatctgtgcctcctaccagacccagacaaactccccagggtctgcctcctctgtggccagccagtccatcatcgcctataccatgagcctgggcgccgagaattccgtggcctactccaacaattctatcgccatccctaccaacttcacaatctccgtgaccacagagatcctgccagtgagcatgaccaagacatccgtggactgcacaatgtatatctgtggcgattccaccgagtgctctaacctgctgctgcagtacggctctttttgtacccagctgaatagagccctgacaggcatcgccgtggagcaggacaagaacacacaggaggtgttcgcccaggtgaagcagatctacaagaccccacccatcaaggactttggcggcttcaacttcagccagatcctgcccgatcctagcaagccatccaagcggtcttttatcgaggacctgctgttcaacaaggtgaccctggccgatgccggcttcatcaagcagtatggcgattgcctgggcgacatcgccgccagagacctgatctgtgcccagaagtttaatggcctgaccgtgctgcctccactgctgacagatgagatgatcgcccagtacacatctgccctgctggccggcaccatcacaagcggatggaccttcggcgcaggagccgccctgcagatcccctttgccatgcagatggcctatcggttcaacggcatcggcgtgacccagaatgtgctgtacgagaaccagaagctgatcgccaatcagtttaactccgccatcggcaagatccaggactctctgagctccacagccagcgccctgggcaagctgcaggatgtggtgaatcagaacgcccaggccctgaataccctggtgaagcagctgtctagcaacttcggcgccatctcctctgtgctgaatgatatcctgagcaggctggaccctccagaggcagaggtgcagatcgaccggctgatcacaggcagactgcagtccctgcagacctacgtgacacagcagctgatcagggcagcagagatcagggcctctgccaatctggccgccaccaagatgagcgagtgcgtgctgggccagtccaagagagtggacttttgtggcaagggctatcacctgatgagcttcccacagtccgcccctcacggagtggtgtttctgcacgtgacctacgtgccagcccaggagaagaacttcaccacagcaccagcaatctgccacgatggcaaggcacactttcctagggagggcgtgttcgtgagcaacggcacccactggtttgtgacacagcgcaatttctacgagccacagatcatcaccacagacaatacattcgtgtccggcaactgtgacgtggtcatcggcatcgtgaacaataccgtgtatgatcctctgcagccagagctggactcttttaaggaggagctggataagtacttcaagaatcacaccagccccgacgtggatctgggcgacatctctggcatcaatgccagcgtggtgaacatccagaaggagatcgacaggctgaacgaggtggccaagaatctgaacgagtccctgatcgatctgcaggagctgggcaagtatgagcagtacatcaagtggccctggtatatctggctgggcttcatcgccggcctgatcgccatcgtgatggtgaccatcatgctgtgctgtatgacaagctgctgttcctgcctgaagggctgctgttcttgtggcagctgctgtaagtttgatgaggacgatagcgagcctgtgctgaagggcgtgaagctgcactacacctgatagccacctatagcaagtgatgtagtatttagtctatgattagttatagaaaaacattaggataaatacacatcctaggccgggccaaaatgtctctagacagattgaagctcaatgatgtctcaaacaaggatagcctgctgtccaactgcaaatacagtgttaccagatccacaggcgatgtaaccagtgtgtctggtcatgctatgcagaaagcccttgcaaggacactcggcatgttcttacttactgccttcaaccgttgcgaagaagtggcagaaatagggctccaatatgccatgtccttgctaggcagagatgatagcatcaagatattaagagaagccggctacaatgtaaaatgtgtggacacacagctcaaggactttacaatcaaattacaaggaaaggaatacaaaatacaagtcctagatatagtgggaatagatgcagccaatttagctgatctagagatacaagccagaggagtggtagcaaaagaactcaaaacaggagccaggctacctgacaatcggaggcatgatgcaccagattgtggtgtgatagttctctgtattgcagcattagttgtttccaaattagctgcaggggacaggggaggacttgatgctgtggaaagaagggctttaaatgtgctgaaagccgagaaagccaggtaccccaacatggaggtcaagcagatagctgaaagtttttatgatctgtttgaaaggaagccttattacattgatgtcttcatcacttttggcctggcccagtctagtgtcaagggaggcagcaaagttgaggggctgttttcaggtctcttcatgaatgcatacggggcaggacaagttatgctgaggtggggtttactggcaaaatctgtcaagaacatcatgctaggccatgctagtgtacaagctgagatggaacaggtggttgaggtttacgaatatgctcagaagcaaggaggggaggcaggattctatcacatcagaaataatccaaaagcttcacttctctctttgaccaattgtcctaatttcaccagtgttgtgcttggcaatgctgcaggtttaggcatcatagggtcatataagggtgctcctaggaatagagaactctttgatgctgccaaagattatgcagaaagattaaaggacaacaatgtaattaactacagtgcattaaacttgactgcagaagaaagagagctgatcagccagcagctgaacattgttgatgacactcctgatgatgatatttaattaaaactggaaaatgtaggataaatatggagaaattcgcccccgaatttgttggcgaggatgctaacaagaaggcagaggagtttctcaaacatagatccttcccttcggaaaaaccactagctggtataccgaacactgccactcatgtcaccaaatataacatgccccctatattgcgtagctcattcaaactcccttccccgagagttgctgcaaatcttactgaaccctctgctccccctaccactccaccacccacacctccccagaacaaggaagagcagcccaaagagtctgatgttgacattgagactatgcatgtctgtaaggttcctgacaatccggaacacagcaagaagccatgctgctcagatgataccgatactaagaaaactaggaagccgatggtcacctttgtggaacccgaggagaaatttgtcggattgggagctagcttgtacagggagaccatgcagacctttgctgctgatggttatgatgaagaaagcaacctatcgtttgaggagactaaccaagagccgggttcttcatctgtagaacaaagactagatagaatagaggagaaattgtcctacataataggccttttaaacaccataatggtagcgactgctggacctaccactgctagagatgagattagagatgcccttataggcactagagaagaacttattgagatgatcaagtctgacatcttgactgtcaatgacagaatagtggccatggagaagctcagagatgaggaatgctccagagctgacactgatgatggatcagcctgttatttaacagacagagcaaggatactagataagatagtgtccagcaatgctgaagaggctaaggaagatttggatgttgatgacatcatgggcattaatttttagttaattaaaataacaacaggacaaataatggaggcctacttggtagagatgtaccatggtgtcccatatacagctgcagtacagctaaacttggttgaaaaacattcagccaacatatcactaactgtgtggataccgatgtttcaaacatctctaccaaagaactccgttatggacctgctacatgatgttacagtcatttgtacacagatatcaacagtgcatggtcccatgatcaaggtagatctgagctcttccaatgcaggtttagctaccatgccaaggcaattcttgataaatgctatcatagctttggatgactggggcaacatggattacgaagtgcctgttgcttttgataaaaagagcttctgtgtgacaattcttaagcctaaaaacatgctttacactgtacccagcattactcccactaatcgacctactcatgagctgatagctgtctgctctttccataacagggtaacattaaagtcattcaatatacctgtcttcatcagagcactgtctatcagacagcaggaccttgatagtgtggagcaggctataagctccgatgtggaccatgctataacaacagctagggtggctccctatgcagggcttacacttgtgatcaacatcacatccaccaaaggagcattcaaactgctaaaggcaggtagtcagattcttgcagaactgggtccctatctgacgcaggtgagcctacatgatgtgattatgaactggaaacatacaggcacttcctacatactcaagagctcctcaacaagtggatgaaaaagagaaagtcaccattgatcagctcaatccacaactacaaccccacgatttcacacagcacaacaaccaccgccaccaacatccacatgacaaccacacatacacacccacatacatatatacacatatcttagttaaataaaatcaggataaataatggatcctaacatgacctcacaccagatcaccctcgagatcaacatgaccagcagccgtattggcacatacactacaccagccccaacagctcttctccttgcatgtgccgtcatcaacacagtgtgtgcgctgataatggcctgcagcagtagaagcactgccacatcaggcattgtcagcagccaatgcacagttcatcccaatcaccctccaccaagttatggcgtcaatgtaactggtctgccgggtaacctatactcaaggaacactacataacattataaataacagaaattatccttcaataaaccccaggccagacagctttaccctgctagacgattcaatcagcccttgcagtatgtcgtctagttaacaaaaaaccggtaggataagtactatcctattggaaccaaacgagacctgtagagcagctcacacaagagaaccacaagctgacttcacctagtatgggaaggaacttagaagtgagtggcagcattaccaatttgaactttgagagaactcagcatcctgacacatttaggactgttgtaaaagtgaaccaaatgtgtaagcttattgcaggtgtgctcacaagtgctgctgtggcagtttgtgtgggggtcataatgtattctgttttcacatcaaaccacaaggccaactccacgcagaatgccacgacccggaacagcacatccacccctccccaaccaaccgccggtctgcccaccacagagcaagggaccatccccagattcaccaaaccccccaccaaaaccgccacccaccatgagatcacagagcccgtcaaaatggcaacaccttcagaggatccctaccaatgctccagcaatggttatttggaccgacctgatttacctgaaaatttcaaactcgtattggatgttatatgcaagcctccaggtcctgaacatcacaacaccagctgttatgagaaacgtgaaatcaacccaggaagtgtttgccctgatcttgtaacaatgaaggcaaacatgggcttaaacaatggtggtggggaggatgctgcaccttatatagaggttaccaccctttctacgtactccaacaaaagggcaatgtgtgtccacaatgggtgtgatcaaggcttctgtttcttcctttctggtttaagcactgatcaggagagagctgtgctagagcttggaggtcaacaggctatcatggagttgcattatgattcctactggaaacactattggagtaactctaattgtgttgttcccagaacaaactgcaacctgacagaccaaactgagattttgtttcctaggtttaacaacaagaatcagtctcagtgtaccacctgtgcagattcagctggcctagataacaaattttatctcacatgtgatgggcttttaagaaccctccctctagttggactacccagcctaagtcctcaggcttacaaagctgtacccacacaaactacaggcaccaccacggcaccaacatcagagacgaggcacccaacccctgcacccaggaggtccaaacctctcagtcggaagaagagagctttatgtggtgtagactcaagcagagaacccaaaccaacaatgccttactggtgtcctatgctccaattatttccaaggaggtctaattcttaagtgacctattcctgaattaacttcagaataagtaccaaccttatcagtagttaatgaaaactaagctttgatataataggacaaatatgattcctggcaggatctttctagtccttctggtgatcttcaacaccaagccaattcacccaaatacattaacagaaaaattctatgagtccacatgtagtgttgagactgcaggttataagagtgcccttagaacaggttggcatatgacagttatgtcaattaagttgtctcaaataaatattgagtcatgcaagagcagcaactcgttattggctcatgagcttgcaatctatagtagtgcagtggatgaattgagaacgttatcatccaatgccttgaagtccaaaaggaagaagaggttcctcggtttgattcttggtctcggagctgcagtcactgccggggtggctttagccaagacagtgcaacttgaaagtgagattgcattgattagagatgcagtgagaaatacaaatgaggctgttgttagcctaaccaacggcatgtcagtgttggctaaagtggtggatgatttgaaaaacttcatatctaaagaattactcccaaaaataaaccgagtctcttgtgatgtgcacgacatcactgccgtcattagattccaacagctcaacaaaagacttttggaagtatctcgtgaattttcatctaatgcaggattaacacacactgtttcatcttttatgttaacagaccgggaactcacctccattgtaggcggcatggctgtttcagcaggccaaaaagagataatgctatctagcaaagctataatgagaagaaatgggttagcaatattaagttcagtcaacgctgacacactggtttatgtaatacaactcccattatttggtgttatggacacagattgttgggtaataagaagttctatagactgtcataacatagcagacaagtatgcttgtttggctagagctgataatggctggtattgtcacaatgctggctcattatcatacttcccgtcgccaacggattgtgagatccacaatgggtatgctttctgtgacactctaaaaagtctaactgtacctgtaacatcacgagaatgcaactcaaacatgtataccactaactacgattgtaagatttccacaagtaaaacttatgtgagtacagcggtactgactacaatgggttgcttggtatcttgttatggtcataacagttgcacagtcatcaataatgacaaaggtataataaggactctgccagatggttgccactacatctccaacaaaggtgtggacagggttcaagtaggtaacactgtttactatcttagcaaagaagttggcaagtcaattgttgtcagaggggaaccattggtcttgaaatatgaccctttgagtttccctgacgataaatttgatgttgctataagagatgtggagcatagcatcaatcagacacgcacattcttgaaggcctctgatcagttattggacttaagtgaaaacagagagaataaaaatttaaacaagtcatatatactaacaactctgctcttcgttgtaatgcttattataataatggctgtcatagggttcattctgtataaggtattgaaaatgatcagagacaacaagttgaaatccaaaagtacacctggcctcacagttttatcatgacaattgtaccaaaccataattgagttagttaattaaaaacttaggataagtgacaatccagacccaacacctctttcaactctcaaggataaggtaggatgagtgtgagaccttgcaaatttgaggttcaagggttttgttccagagggaggaattgcaagtatagtcataaatattgggaatggcctttgaaaactcttatgctcaggcagaactacatgcttaataggatttataggttcctcgacaccaacacagatgcaatgtcagatgtcagcggatttgatgcaccacaaaggactgctgagtatgccttgggaaccataggtgtgctgaaaagttacctggaaaaaactaacaacatcactaaatcaatagcttgtggcagtttgatcactgtattgcagaacttggatgttggtctagtaatacaagcaagagatagcaacactgaggacaccaattacttgagaagttgcaacactatactgtcttatatagacaagatacacaagaagagacaaattattcacattctcaaaagactgccagtaggagtactatgcaatctgatccaatctgtcatctccatcgaggagaagataaattcttctatgaaaacagaatgataaggctgcctaaatactatccagccatactgcataagatgtatattattagagtaaatagaaacctcacttacgatgggtctggaccatccacaataatagatgcaggaaagtctgtggtgtggaatcgtgttgatgtgatagcttgtgtgaaagaggccttgtgctgcatagaattcagctggaataaccaagtgatcatagactttgattatagccaggccagatgatgtggactgtattcctttttttgtcagtaatcagttattaacccaaaattgttaattatgtagactttaagttaactaacttcatgttaattcaatagttatataaaaaaatattcgaattaggatcaatatggatcctattgatgaacaagaagttaatgtgtacttgccggatagctacttaaagggtgttatatcttttagtgaaactaatgctcttggcagctgtatcattggtagacctttcttgaaggatgactttactgccactacttcaatccgtaaccccctaattgaacataaaagaataagggacactaaattagtaaaaaatattgtttcaaaccctcaatataggttagtggagcctctccaaatgcagcatgagctcttgagtgtactatcgcccaatttcatattgcacactgccaacttaaggaaaattatacaaagaagtgttgacataacagataaaaagttgaaccccattttgcacattttgaatcttaattctcctaaccaagagggtaaggtgtcggaacggctaactaggctaattaagaaacatctctctcacatacctaattgggtaagcagctggtacaatatatgggtcaatcttaacaacttactgcaggagtaccgttcaaaggaagttatagaccataactgtgttctgactaggcaattgtctggaagtttcatacatgtggtcatgagtcaatatggagttgtgataattagcaaaaaaagtaaaagatatacaatgtgtacttataaccaattcctaacctggaaggaccttgccttgagcagatttaatgccaattatgtggtctggctaagtaatgtgttaaacacactcaacgaggggttgggattaaggtgtagattaaaaggtcatctgctcagtaagttgtacatttccactgacatctttttatcttcaacatctaatgaattttataatgtggtcaaggaatttgagggcttcatcatgtcactgatattgaaacaaactgaggaagccttatttagcacaaggttttataataacatgttgaacaacttaattgatgccattgatagggctcgactagagtatctggcccgctgtgccaattcagctgccaggattaatttacctagtacagatgttatgatagcatcattgggtgatatcttatctttgataaacgttttaggtgaatccaaccttaacaacttaagtgagttatattttatcttcaggatatttggtcaccctatggttgatgagaggaaggccatggatgcagtcagagataactgttgtgaaacaaagtttctgacggctaagaaccttgcatcgttaagaggagcatatgtttatagaattatcaaaggattcgtagcaaattataacaggtggccttacataaaaactagagtttgccttacaccaacatggattaactatcttgacaccaattcatgtccctcattattagagatgacagaagatgattttattgtgttagctggagtgcactttataagagaattccacatcccaaagctaactgatctggagattatattaaatgacaaggccatatctcctccaaaatcactcatttggtcatgctttccaaaaaactacatacctcaggttatacaagatgagtatgcccggaggtattgtagagctaaagcacctttgaagacaagacgtgtcttggagttctacttacaggacaaggatttcaagttggatcagctccatagagtagtagtgaaccaggactaccttaatgataaagaacatataatttctttaacaggaaaagaaagagagttgggtgttggtaggatgtttgccatgcaacctgggaagcagaggcaagtccaaattttagcagagaagctgttggctgataacatcctgcaattctttccggagacactgactagatacggtgatttggagctgcaaaagatactagagttaaaagctggactttcaaataaaaatgacagatctaaagactcctacaataattatataagtaggtgctcattaattactgatttaagtaaatttaaccaagcttttaggtacgagtcatcctgtgtgtgtagtgatcttttagatgagctacatgggactcaaagcttattctcttggctgcatttaacagtaccactgactactataatgtgtacatataggcatgcgccgccggacactggaaacaactataatgtagatgatattgctgagcagagtggactctaccgctaccacatgggcgggattgagggctggtgccagaagctctggacaacagaggccattgctttgctagatactgtagctgtgaagggccgtttccagctaacttcattaataaatggcgacaaccaaagtattgatatttcaaaaccaacaaggctggggaccaggactcaaagtgaagcagattatgatttggcaataaattctttaagattaatatcagcagcttataaaggcattggacataaattaaaagaaggtgagacctacttgtcacgtgacatgcagttcatgagtaaaacaatacaacatgaaggggtctactacccggcctccatcaagaaaatattaagagttggtccctggatcaacacaatattagatgatataaaaacttcaacagaaagtattggttctctaactcaagaactagaatataaaggtgaaagtttaatgagcagcctgctgctgaggaacttctggctctacagattatattcagtggatttaaaagatcattctttgtgtggaaagcagctctacagatccttaataaaagtgttaaaacatttgaagaggtgcttcaacctggagaaccttggggaatgtttggaattatttttaaatgtgcccatgcagtttggaggtgctgacccaaatgtcatctacaggagcttctacagaagaactccagattttctaacagaaagtataactcatctcatcctcattttaaaacattttagaagagatttggaattcaacaaagataatgtctccaaagctgttctttctttgctagagttcaccaagaatgattctgcagaatttgtaactttgatgagagatcctcaagcaattggtagtgagaggcaggccaagatcacttcagacatcaacagaacagctgtaacttcagtgttatcaaatgctccaaatgaaatatttagaacttcagctcttcattacagcagcacagaaaatgaattaaatggaatagcaagtggagtttctcctgtttatcctcatggtcttcgagttttatatgaaagtttacctttttataaagcagagaagattgtcaacatggtttctgggaccaagtccatcaccaacatactggagaagacatcagccatctcctacacagatataattcgagccaccaacatgatggtggagaacctcactttgctaacaagaataatgaaaccaggtgctgacacatctttggatcctgacacaatagtaataacaatattatcaaaaataataagagataaatcctgggatgttggtgatataattggtgtcacttccccatctcctgtctcctgcttcaaggtggtctacacatcaactctacaaaataattcagtagtaatagaaagatacacaacagacacctacacaagaggtaagagaggccccaccaagccctgggtgggcagcagcacacaggagaagaagtccatgcctgtctacaacagacaagttttaacaagaggacaaagagatcaaatagaaaatatagcaaagctggagtgggtgttttcttcagtagcaaatattgattctttgctaaatgagctcagcaccatgactttgggtctttctctaaggaaatgtagacaactttttccaacatatttaagtttaaacttcctgcacaggctttctgtcagcagcaggcccagagaatatccttcttctcttcctgcctacaggacaacaaattttcattttgatactggaccaataaataaagtgttaacagaaagatttggagatgaagatataaatttggtatttcaaaatgcaatatcatatggtctttccaccatgtctttggtggagcagtttactggtgtctgtccaaataaagttttgctggtgcccaagctacaagaaatacaactaatgaaagttccaatatttcaaggtggcttcaacctacaaagtataattccaataataaggcagcagcacatgttcctgcccaaccacatcactccagcccagtatattgaattatttctttcttcaaaacaatttcattcaagaataaatttaaaacacaacaacagatttaaacttgttttacaaaaagattattttaatggggagaacatgatagaaactttgtccacctgtttggcaggccactggatcatcattttgatgctaatgaaggagagtcaggggatatttgacaaggagtggtatgatggttttgtaacagaccacatgttcctggacctgcagctcttcctctcctccttcaagacatttctaactgtcttcaactttgcttatttaaaagttggttcaaatatagaagaaataacaggaaatcaagccaacctgctggagctgctggacctgggctactggaagaacatgtataaagtattttcagagaccaaggtgcggctggctttgctaaaacaagatttatcatttaattctgtgaagaacagcagcagcttccggcactggtttataaattctctacaagaagtacaatgtacttctgtgccttgggtggtaaatgtaacaagaaatccaactcatttaaaaggtgttctacagtacatgaagatgatagaaagtggcatgattcaaggttattcagcaaatatttcttcagttttaagtatcccatataattatccagacatggcgcacatgatgacaaaaataataagaaatcgaggccacatgtcctatgattatccaaagatgaagaaaagtttaactttctccatgacagacatgagtgacagctacatgctcaacctcttccccaaagtagaatgttcttacatgagtggttatttggataaactagatgatactctacaacttctaaagaaacctcctgttggaagaaaagttccttctgtggctttgccctggcaccactgcaacagatacaactttgtcttcagcagcacaggctgcaaagtttctgtcattgacatgcttccaaaacatttccgaagaagtaatttaaaagtaatatgttttattggagaaggggcgggcaacctcatgctaagagctgttttggaagttggtggaaatataaaattaatatatagatccttaaaagatcctgatgatcatcatgttcctgtagaatttctaagattaaaaccttgttatccttatattgatactggtggcagtttatctttggcttcaacagatgccaccaacaaggcccactgggattatttacatcttcactggacagatcctttaaatttaatagtatgtgatgcagaaataagtggtgtgaagcactggctaaaaattcttcacaggtggtatgagcacatgacttcctgcaagcactgtttaaaatcagaacatgataaatatttaataataaaatatcatgctcaagatgatttaatagatcttcctcatggtgtcaggctactaaaatgtaacatctgcctgggctccaaactaagtggcagtgagagctacctgctcattggtcttggtctttcaaataaacttcctgtctacagtgaagttcttcattcaaaacttcttttggcagaatgtcatcagtttcatcatccaaaatatttggatgtttctggaataaatacaaatataaaatccttaataccaatgttggattatccaataacttacaacaagatcaccactttgctagaaagtgtgcgggagctttcttcaaataaaaacaagaacaccatgtggattggaagaaatcctgtctaccataataaatggctaaagaggaaatatttcaacattttaaaatggctaaaatactgtatagaacttcctgccttcaggatggattataattcatttgagagaatagaaatgctttatccaaatttaagagatttggtagattctgtttctacttcagagctgaagaaagtaataaaagtaacaggcatcctcttcaggagcaacaccatgtgaattaatatgccaatgctaacatgtcatccccactactttttttgttcaatcactctcagtctagacatgtgagaagatcccaaacccaactgcacccctcccactcgaaatcagttgtagcctcagcagctccatctgccatgatctctgaccagcagcaaatgtattattattttaatttgtctatagttaacaaaaaattgatatctcacaggttgtaaacatagttcttttataattattgttagttaaactattgtgtttgacttcctttgggtatttttttcccgtgggtcggcatggcatctccacctcctcgcggtccgacctgggcatccgaaggaggacgcacgtccactcggatggctaagggagagcctgcagtagcataaccccttggggcctctaaacgggtcttgaggggttttttgctgaaaggaggaactatatacgcgtcgacgggcccgcgctcactggccgtcgttttacaacgtcgtgactgggaaaaccctggcgttacccaacttaatcgccttgcagcacatccccctttcgccagctggcgtaatagcgaagaggcccgcaccgatcgcccttcccaacagttgcgcagcctgaatggcgaatgggacgcgccctgtagcggcgcattaagcgcggcgggtgtggtggttacgcgcagcgtgaccgctacacttgccagcgccctagcgcccgctcctttcgctttcttcccttcctttctcgccacgttcgccggctttccccgtcaagctctaaatcgggggctccctttagggttccgatttagtgctttacggcacctcgaccccaaaaaacttgattagggtgatggttcacgtagtgggccatcgccctgatagacggtttttcgccctttgacgttggagtccacgttctttaatagtggactcttgttccaaactggaacaacactcaaccctatctcggtctattcttttgatttataagggattttgccgatttcggcctattggttaaaaaatgagctgatttaacaaaaatttaacgcgaattttaacaaaatattaacgcttacaatttaggtggcacttttcggggaaatgtgcgcggaacccctatttgtttatttttctaaatacattcaaatatgtatccgctcatgagacaataaccctgataaatgcttcaataatattgaaaaaggaagagtatgagtattcaacatttccgtgtcgcccttattcccttttttgcggcattttgccttcctgtttttgctcacccagaaacgctggtgaaagtaaaagatgctgaagatcagttgggtgcacgagtgggttacatcgaactggatctcaacagcggtaagatccttgagagttttcgccccgaagaacgttttccaatgatgagcacttttaaagttctgctatgtggcgcggtattatcccgtattgacgccgggcaagagcaactcggtcgccgcatacactattctcagaatgacttggttgagtactcaccagtcacagaaaagcatcttacggatggcatgacagtaagagaattatgcagtgctgccataaccatgagtgataacactgcggccaacttacttctgacaacgatcggaggaccgaaggagctaaccgcttttttgcacaacatgggggatcatgtaactcgccttgatcgttgggaaccggagctgaatgaagccataccaaacgacgagcgtgacaccacgatgcctgtagcaatggcaacaacgttgcgcaaactattaactggcgaactacttactctagcttcccggcaacaattaatagactggatggaggcggataaagttgcaggaccacttctgcgctcggcccttccggctggctggtttattgctgataaatctggagccggtgagcgtgggtctcgcggtatcattgcagcactggggccagatggtaagccctcccgtatcgtagttatctacacgacggggagtcaggcaactatggatgaacgaaatagacagatcgctgagataggtgcctcactgattaagcattggtaactgtcagaccaagtttactcatatatactttagattgatttaaaacttcatttttaatttaaaaggatctaggtgaagatcctttttgataatctcatgaccaaaatcccttaacgtgagttttcgttccactgagcgtcagaccccgtagaaaagatcaaaggatcttcttgagatcctttttttctgcgcgtaatctgctgcttgcaaacaaaaaaaccaccgctaccagcggtggtttgtttgccggatcaagagctaccaactctttttccgaaggtaactggcttcagcagagcgcagataccaaatactgtccttctagtgtagccgtagttaggccaccacttcaagaactctgtagcaccgcctacatacctcgctctgctaatcctgttaccagtggctgctgccagtggcgataagtcgtgtcttaccgggttggactcaagacgatagttaccggataaggcgcagcggtcgggctgaacggggggttcgtgcacacagcccagcttggagcgaacgacctacaccgaactgagatacctacagcgtgagctatgagaaagcgccacgcttcccgaagggagaaaggcggacaggtatccggtaagcggcagggtcggaacaggagagcgcacgagggagcttccagggggaaacgcctggtatctttatagtcctgtcgggtttcgccacctctgacttgagcgtcgatttttgtgatgctcgtcaggggggcggagcctatggaaaaacgccagcaacgcggcctttttacggttcctggccttttgctggccttttgctcacatgttctttcctgcgttatcccctgattctgtggataaccgtattaccgcctttgagtgagctgataccgctcgccgcagccgaacgaccgagcgcagcgagtcagtgagcgaggaagcggaagagcgcccaatacgcaaaccgcctctccccgcgcgttggccgattcattaatgcagctggcacgacaggtttcccgactggaaagcgggcagtgagcgcaacgcaattaatgtgagttagctcactcattaggcaccccaggctttacactttatgcttccggctcgtatgttgtgtggaattgtgagcggataacaatttcacacaggaaacagctatgaccatgattacgccaagcgcgcccgggtaatacgactcactataggg

SEQ ID NO: 13 - DNA, 18717 bp, synthetic construct
  source 1..18717: mol_type = other DNA
acgcgaaaaaatgcataacaaaactatcaacctgaaaaaagttaggacaagtgaagattgctagtcccaaagaccagaatcatgggctgtaatgtgatgatggagcttgattatggtggacgagctgcatggctggcattccacataaccaactttgataggtcagatttggaaactatcctaagaggtgctagggtgtgcaatacatggcaagatcagagactctccgtgtaccttgtgggaagggattgcaatttgttaagaccatttgtgcaagctgccaaatttatccataatactaggagaggccaaacattaacacattggttcacaaaaaatatcgtgtttagttctacagggcaagagacagagcctcccattgaccccacatgtgagctgttggtagagctgatcagtggttaagatgacagcacattatgtagttaattaaaacaaagggtaggacaagtcctaatgtccacagctatgaacaagttcactcagaccatctctaaacctgccactatcttgaatatttcagacagtgaagagtcgggcgatgaggcaggggtgggcaaggtgtcccgtaccacacagagctcagagaggtggcttgatttgctcattgaaaagttccagccgagcctacaaaacatcactagatacatcaactggaacttcatcaggatctgcaatgataggcttaaaaaagaaaaaatggggtacattgaggccaagcaatatgtggaagacatggcttggatggtgatagcatctgaggcagacagcattgagtggaagtgcataaggaggcaggagaaagtgactggggtgaaatacccaaagttcttctttgtacaacacaaagaggactggattgagtgcacaggatgcattccgtacccaggccatgacttgatctatgatgaggatgatgatgactgagctgactcagatcactccaaccagcagagagatccatagttatagaaaaacattaggataaatacacatcctaggccgccaccatgttcgtgtttctggtgctgctgcctctggtgagctcccagtgcgtgaacctgaccacaaggacccagctgccccctgcctataccaattccttcacacggggcgtgtactatcccgacaaggtgtttagatctagcgtgctgcactccacacaggatctgtttctgcctttcttttctaacgtgacctggttccacgccatccacgtgagcggcaccaatggcacaaagcggttcgacaatccagtgctgccctttaacgatggcgtgtacttcgcctccaccgagaagtctaacatcatcagaggctggatctttggcaccacactggacagcaagacacagtccctgctgatcgtgaacaatgccaccaacgtggtcatcaaggtgtgcgagttccagttttgtaatgatccattcctgggcgtgtactatcacaagaacaataagtcttggatggagagcgagtttcgcgtgtattcctctgccaacaattgcacatttgagtacgtgtcccagcccttcctgatggacctggagggcaagcagggcaatttcaagaacctgagggagttcgtgtttaagaatatcgatggctacttcaagatctactccaagcacaccccaatcaacctggtgcgcgacctgccacagggcttctctgccctggagccactggtggatctgcccatcggcatcaacatcacccggtttcagacactgctggccctgcacagaagctacctgacaccaggcgacagctcctctggatggaccgcaggagctgccgcctactatgtgggctatctgcagcccaggaccttcctgctgaagtacaacgagaatggcaccatcacagacgccgtggattgcgccctggatcccctgtctgagaccaagtgtacactgaagagctttaccgtggagaagggcatctatcagacaagcaatttcagggtgcagcctaccgagtccatcgtgcgctttcccaatatcacaaacctgtgcccttttggcgaggtgttcaacgcaacccgcttcgccagcgtgtacgcctggaataggaagcgcatctccaactgcgtggccgactattctgtgctgtacaacagcgcctccttctctacctttaagtgctatggcgtgagccccacaaagctgaatgacctgtgctttaccaacgtgtacgccgattccttcgtgatcaggggcgacgaggtgcgccagatcgcccctggccagacaggcaagatcgccgactacaattataagctgcctgacgatttcaccggctgcgtgatcgcctggaactctaacaatctggatagcaaagtgggcggcaactacaattatctgtaccggctgtttagaaagtctaatctgaagccattcgagagggacatctccacagagatctaccaggccggctctaccccctgcaatggcgtggagggctttaactgttatttccctctgcagagctacggcttccagccaacaaacggcgtgggctatcagccctaccgcgtggtggtgctgtcttttgagctgctgcacgcacctgcaacagtgtgcggaccaaagaagagcaccaatctggtgaagaacaagtgcgtgaacttcaacttcaacggactgaccggcacaggcgtgctgaccgagtccaacaagaagttcctgccttttcagcagttcggcagggacatcgcagataccacagacgccgtgcgcgaccctcagaccctggagatcctggatatcacaccatgctccttcggcggcgtgtctgtgatcacaccaggcaccaatacaagcaaccaggtggccgtgctgtatcaggacgtgaattgtaccgaggtgcccgtggcaatccacgcagatcagctgacccctacatggcgggtgtactctaccggcagcaacgtgttccagacaagagccggatgcctgatcggagccgagcacgtgaacaatagctatgagtgcgacatccctatcggcgccggcatctgtgcctcctaccagacccagacaaactccccacggagagcccggtctgtggccagccagtccatcatcgcctataccatgagcctgggcgccgagaattccgtggcctactccaacaattctatcgccatccctaccaacttcacaatctccgtgaccacagagatcctgccagtgagcatgaccaagacatccgtggactgcacaatgtatatctgtggcgattccaccgagtgctctaacctgctgctgcagtacggctctttttgtacccagctgaatagagccctgacaggcatcgccgtggagcaggacaagaacacacaggaggtgttcgcccaggtgaagcagatctacaagaccccacccatcaaggactttggcggcttcaacttcagccagatcctgcccgatcctagcaagccatccaagcggtcttttatcgaggacctgctgttcaacaaggtgaccctggccgatgccggcttcatcaagcagtatggcgattgcctgggcgacatcgccgccagagacctgatctgtgcccagaagtttaatggcctgaccgtgctgcctccactgctgacagatgagatgatcgcccagtacacatctgccctgctggccggcaccatcacaagcggatggaccttcggcgcaggagccgccctgcagatcccctttgccatgcagatggcctatcggttcaacggcatcggcgtgacccagaatgtgctgtacgagaaccagaagctgatcgccaatcagtttaactccgccatcggcaagatccaggactctctgagctccacagccagcgccctgggcaagctgcaggatgtggtgaatcagaacgcccaggccctgaataccctggtgaagcagctgtctagcaacttcggcgccatctcctctgtgctgaatgatatcctgagcaggctggacaaggtggaggcagaggtgcagatcgaccggctgatcacaggcagactgcagtccctgcagacctacgtgacacagcagctgatcagggcagcagagatcagggcctctgccaatctggccgccaccaagatgagcgagtgcgtgctgggccagtccaagagagtggacttttgtggcaagggctatcacctgatgagcttcccacagtccgcccctcacggagtggtgtttctgcacgtgacctacgtgccagcccaggagaagaacttcaccacagcaccagcaatctgccacgatggcaaggcacactttcctagggagggcgtgttcgtgagcaacggcacccactggtttgtgacacagcgcaatttctacgagccacagatcatcaccacagacaatacattcgtgtccggcaactgtgacgtggtcatcggcatcgtgaacaataccgtgtatgatcctctgcagccagagctggactcttttaaggaggagctggataagtacttcaagaatcacaccagccccgacgtggatctgggcgacatctctggcatcaatgccagcgtggtgaacatccagaaggagatcgacaggctgaacgaggtggccaagaatctgaacgagtccctgatcgatctgcaggagctgggcaagtatgagcagtacatcaagtggatcctgaccacactgctgttcgtggtcatgctgatcatcatcatggccgtgatcggctttatcctgtacaaggtgctgaagatgatccgggacaacaagctgaagagcaagtccacccccggcctgacagtgctgtcttgatagccacctatagcaagtgatgtagtatttagtctatgattagttatagaaaaacattaggataaatacacatcctaggccgggccaaaatgtctctagacagattgaagctcaatgatgtctcaaacaaggatagcctgctgtccaactgcaaatacagtgttaccagatccacaggcgatgtaaccagtgtgtctggtcatgctatgcagaaagcccttgcaaggacactcggcatgttcttacttactgccttcaaccgttgcgaagaagtggcagaaatagggctccaatatgccatgtccttgctaggcagagatgatagcatcaagatattaagagaagccggctacaatgtaaaatgtgtggacacacagctcaaggactttacaatcaaattacaaggaaaggaatacaaaatacaagtcctagatatagtgggaatagatgcagccaatttagctgatctagagatacaagccagaggagtggtagcaaaagaactcaaaacaggagccaggctacctgacaatcggaggcatgatgcaccagattgtggtgtgatagttctctgtattgcagcattagttgtttccaaattagctgcaggggacaggggaggacttgatgctgtggaaagaagggctttaaatgtgctgaaagccgagaaagccaggtaccccaacatggaggtcaagcagatagctgaaagtttttatgatctgtttgaaaggaagccttattacattgatgtcttcatcacttttggcctggcccagtctagtgtcaagggaggcagcaaagttgaggggctgttttcaggtctcttcatgaatgcatacggggcaggacaagttatgctgaggtggggtttactggcaaaatctgtcaagaacatcatgctaggccatgctagtgtacaagctgagatggaacaggtggttgaggtttacgaatatgctcagaagcaaggaggggaggcaggattctatcacatcagaaataatccaaaagcttcacttctctctttgaccaattgtcctaatttcaccagtgttgtgcttggcaatgctgcaggtttaggcatcatagggtcatataagggtgctcctaggaatagagaactctttgatgctgccaaagattatgcagaaagattaaaggacaacaatgtaattaactacagtgcattaaacttgactgcagaagaaagagagctgatcagccagcagctgaacattgttgatgacactcctgatgatgatatttaattaaaactggaaaatgtaggataaatatggagaaattcgcccccgaatttgttggcgaggatgctaacaagaaggcagaggagtttctcaaacatagatccttcccttcggaaaaaccactagctggtataccgaacactgccactcatgtcaccaaatataacatgccccctatattgcgtagctcattcaaactcccttccccgagagttgctgcaaatcttactgaaccctctgctccccctaccactccaccacccacacctccccagaacaaggaagagcagcccaaagagtctgatgttgacattgagactatgcatgtctgtaaggttcctgacaatccggaacacagcaagaagccatgctgctcagatgataccgatactaagaaaactaggaagccgatggtcacctttgtggaacccgaggagaaatttgtcggattgggagctagcttgtacagggagaccatgcagacctttgctgctgatggttatgatgaagaaagcaacctatcgtttgaggagactaaccaagagccgggttcttcatctgtagaacaaagactagatagaatagaggagaaattgtcctacataataggccttttaaacaccataatggtagcgactgctggacctaccactgctagagatgagattagagatgcccttataggcactagagaagaacttattgagatgatcaagtctgacatcttgactgtcaatgacagaatagtggccatggagaagctcagagatgaggaatgctccagagctgacactgatgatggatcagcctgttatttaacagacagagcaaggatactagataagatagtgtccagcaatgctgaagaggctaaggaagatttggatgttgatgacatcatgggcattaatttttagttaattaaaataacaacaggacaaataatggaggcctacttggtagagatgtaccatggtgtcccatatacagctgcagtacagctaaacttggttgaaaaacattcagccaacatatcactaactgtgtggataccgatgtttcaaacatctctaccaaagaactccgttatggacctgctacatgatgttacagtcatttgtacacagatatcaacagtgcatggtcccatgatcaaggtagatctgagctcttccaatgcaggtttagctaccatgccaaggcaattcttgataaatgctatcatagctttggatgactggggcaacatggattacgaagtgcctgttgcttttgataaaaagagcttctgtgtgacaattcttaagcctaaaaacatgctttacactgtacccagcattactcccactaatcgacctactcatgagctgatagctgtctgctctttccataacagggtaacattaaagtcattcaatatacctgtcttcatcagagcactgtctatcagacagcaggaccttgatagtgtggagcaggctataagctccgatgtggaccatgctataacaacagctagggtggctccctatgcagggcttacacttgtgatcaacatcacatccaccaaaggagcattcaaactgctaaaggcaggtagtcagattcttgcagaactgggtccctatctgacgcaggtgagcctacatgatgtgattatgaactggaaacatacaggcacttcctacatactcaagagctcctcaacaagtggatgaaaaagagaaagtcaccattgatcagctcaatccacaactacaaccccacgatttcacacagcacaacaaccaccgccaccaacatccacatgacaaccacacatacacacccacatacatatatacacatatcttagttaaataaaatcaggataaataatggatcctaacatgacctcacaccagatcaccctcgagatcaacatgaccagcagccgtattggcacatacactacaccagccccaacagctcttctccttgcatgtgccgtcatcaacacagtgtgtgcgctgataatggcctgcagcagtagaagcactgccacatcaggcattgtcagcagccaatgcacagttcatcccaatcaccctccaccaagttatggcgtcaatgtaactggtctgccgggtaacctatactcaaggaacactacataacattataaataacagaaattatccttcaataaaccccaggccagacagctttaccctgctagacgattcaatcagcccttgcagtatgtcgtctagttaacaaaaaaccggtaggataagtactatcctattggaaccaaacgagacctgtagagcagctcacacaagagaaccacaagctgacttcacctagtatgggaaggaacttagaagtgagtggcagcattaccaatttgaactttgagagaactcagcatcctgacacatttaggactgttgtaaaagtgaaccaaatgtgtaagcttattgcaggtgtgctcacaagtgctgctgtggcagtttgtgtgggggtcataatgtattctgttttcacatcaaaccacaaggccaactccacgcagaatgccacgacccggaacagcacatccacccctccccaaccaaccgccggtctgcccaccacagagcaagggaccatccccagattcaccaaaccccccaccaaaaccgccacccaccatgagatcacagagcccgtcaaaatggcaacaccttcagaggatccctaccaatgctccagcaatggttatttggaccgacctgatttacctgaaaatttcaaactcgtattggatgttatatgcaagcctccaggtcctgaacatcacaacaccagctgttatgagaaacgtgaaatcaacccaggaagtgtttgccctgatcttgtaacaatgaaggcaaacatgggcttaaacaatggtggtggggaggatgctgcaccttatatagaggttaccaccctttctacgtactccaacaaaagggcaatgtgtgtccacaatgggtgtgatcaaggcttctgtttcttcctttctggtttaagcactgatcaggagagagctgtgctagagcttggaggtcaacaggctatcatggagttgcattatgattcctactggaaacactattggagtaactctaattgtgttgttcccagaacaaactgcaacctgacagaccaaactgagattttgtttcctaggtttaacaacaagaatcagtctcagtgtaccacctgtgcagattcagctggcctagataacaaattttatctcacatgtgatgggcttttaagaaccctccctctagttggactacccagcctaagtcctcaggcttacaaagctgtacccacacaaactacaggcaccaccacggcaccaacatcagagacgaggcacccaacccctgcacccaggaggtccaaacctctcagtcggaagaagagagctttatgtggtgtagactcaagcagagaacccaaaccaacaatgccttactggtgtcctatgctccaattatttccaaggaggtctaattcttaagtgacctattcctgaattaacttcagaataagtaccaaccttatcagtagttaatgaaaactaagctttgatataataggacaaatatgattcctggcaggatctttctagtccttctggtgatcttcaacaccaagccaattcacccaaatacattaacagaaaaattctatgagtccacatgtagtgttgagactgcaggttataagagtgcccttagaacaggttggcatatgacagttatgtcaattaagttgtctcaaataaatattgagtcatgcaagagcagcaactcgttattggctcatgagcttgcaatctatagtagtgcagtggatgaattgagaacgttatcatccaatgccttgaagtccaaaaggaagaagaggttcctcggtttgattcttggtctcggagctgcagtcactgccggggtggctttagccaagacagtgcaacttgaaagtgagattgcattgattagagatgcagtgagaaatacaaatgaggctgttgttagcctaaccaacggcatgtcagtgttggctaaagtggtggatgatttgaaaaacttcatatctaaagaattactcccaaaaataaaccgagtctcttgtgatgtgcacgacatcactgccgtcattagattccaacagctcaacaaaagacttttggaagtatctcgtgaattttcatctaatgcaggattaacacacactgtttcatcttttatgttaacagaccgggaactcacctccattgtaggcggcatggctgtttcagcaggccaaaaagagataatgctatctagcaaagctataatgagaagaaatgggttagcaatattaagttcagtcaacgctgacacactggtttatgtaatacaactcccattatttggtgttatggacacagattgttgggtaataagaagttctatagactgtcataacatagcagacaagtatgcttgtttggctagagctgataatggctggtattgtcacaatgctggctcattatcatacttcccgtcgccaacggattgtgagatccacaatgggtatgctttctgtgacactctaaaaagtctaactgtacctgtaacatcacgagaatgcaactcaaacatgtataccactaactacgattgtaagatttccacaagtaaaacttatgtgagtacagcggtactgactacaatgggttgcttggtatcttgttatggtcataacagttgcacagtcatcaataatgacaaaggtataataaggactctgccagatggttgccactacatctccaacaaaggtgtggacagggttcaagtaggtaacactgtttactatcttagcaaagaagttggcaagtcaattgttgtcagaggggaaccattggtcttgaaatatgaccctttgagtttccctgacgataaatttgatgttgctataagagatgtggagcatagcatcaatcagacacgcacattcttgaaggcctctgatcagttattggacttaagtgaaaacagagagaataaaaatttaaacaagtcatatatactaacaactctgctcttcgttgtaatgcttattataataatggctgtcatagggttcattctgtataaggtattgaaaatgatcagagacaacaagttgaaatccaaaagtacacctggcctcacagttttatcatgacaattgtaccaaaccataattgagttagttaattaaaaacttaggataagtgacaatccagacccaacacctctttcaactctcaaggataaggtaggatgagtgtgagaccttgcaaatttgaggttcaagggttttgttccagagggaggaattgcaagtatagtcataaatattgggaatggcctttgaaaactcttatgctcaggcagaactacatgcttaataggatttataggttcctcgacaccaacacagatgcaatgtcagatgtcagcggatttgatgcaccacaaaggactgctgagtatgccttgggaaccataggtgtgctgaaaagttacctggaaaaaactaacaacatcactaaatcaatagcttgtggcagtttgatcactgtattgcagaacttggatgttggtctagtaatacaagcaagagatagcaacactgaggacaccaattacttgagaagttgcaacactatactgtcttatatagacaagatacacaagaagagacaaattattcacattctcaaaagactgccagtaggagtactatgcaatctgatccaatctgtcatctccatcgaggagaagataaattcttctatgaaaacagaatgataaggctgcctaaatactatccagccatactgcataagatgtatattattagagtaaatagaaacctcacttacgatgggtctggaccatccacaataatagatgcaggaaagtctgtggtgtggaatcgtgttgatgtgatagcttgtgtgaaagaggccttgtgctgcatagaattcagctggaataaccaagtgatcatagactttgattatagccaggccagatgatgtggactgtattcctttttttgtcagtaatcagttattaacccaaaattgttaattatgtagactttaagttaactaacttcatgttaattcaatagttatataaaaaaatattcgaattaggatcaatatggatcctattgatgaacaagaagttaatgtgtacttgccggatagctacttaaagggtgttatatcttttagtgaaactaatgctcttggcagctgtatcattggtagacctttcttgaaggatgactttactgccactacttcaatccgtaaccccctaattgaacataaaagaataagggacactaaattagtaaaaaatattgtttcaaaccctcaatataggttagtggagcctctccaaatgcagcatgagctcttgagtgtactatcgcccaatttcatattgcacactgccaacttaaggaaaattatacaaagaagtgttgacataacagataaaaagttgaaccccattttgcacattttgaatcttaattctcctaaccaagagggtaaggtgtcggaacggctaactaggctaattaagaaacatctctctcacatacctaattgggtaagcagctggtacaatatatgggtcaatcttaacaacttactgcaggagtaccgttcaaaggaagttatagaccataactgtgttctgactaggcaattgtctggaagtttcatacatgtggtcatgagtcaatatggagttgtgataattagcaaaaaaagtaaaagatatacaatgtgtacttataaccaattcctaacctggaaggaccttgccttgagcagatttaatgccaattatgtggtctggctaagtaatgtgttaaacacactcaacgaggggttgggattaaggtgtagattaaaaggtcatctgctcagtaagttgtacatttccactgacatctttttatcttcaacatctaatgaattttataatgtggtcaaggaatttgagggcttcatcatgtcactgatattgaaacaaactgaggaagccttatttagcacaaggttttataataacatgttgaacaacttaattgatgccattgatagggctcgactagagtatctggcccgctgtgccaattcagctgccaggattaatttacctagtacagatgttatgatagcatcattgggtgatatcttatctttgataaacgttttaggtgaatccaaccttaacaacttaagtgagttatattttatcttcaggatatttggtcaccctatggttgatgagaggaaggccatggatgcagtcagagataactgttgtgaaacaaagtttctgacggctaagaaccttgcatcgttaagaggagcatatgtttatagaattatcaaaggattcgtagcaaattataacaggtggccttacataaaaactagagtttgccttacaccaacatggattaactatcttgacaccaattcatgtccctcattattagagatgacagaagatgattttattgtgttagctggagtgcactttataagagaattccacatcccaaagctaactgatctggagattatattaaatgacaaggccatatctcctccaaaatcactcatttggtcatgctttccaaaaaactacatacctcaggttatacaagatgagtatgcccggaggtattgtagagctaaagcacctttgaagacaagacgtgtcttggagttctacttacaggacaaggatttcaagttggatcagctccatagagtagtagtgaaccaggactaccttaatgataaagaacatataatttctttaacaggaaaagaaagagagttgggtgttggtaggatgtttgccatgcaacctgggaagcagaggcaagtccaaattttagcagagaagctgttggctgataacatcctgcaattctttccggagacactgactagatacggtgatttggagctgcaaaagatactagagttaaaagctggactttcaaataaaaatgacagatctaaagactcctacaataattatataagtaggtgctcattaattactgatttaagtaaatttaaccaagcttttaggtacgagtcatcctgtgtgtgtagtgatcttttagatgagctacatgggactcaaagcttattctcttggctgcatttaacagtaccactgactactataatgtgtacatataggcatgcgccgccggacactggaaacaactataatgtagatgatattgctgagcagagtggactctaccgctaccacatgggcgggattgagggctggtgccagaagctctggacaacagaggccattgctttgctagatactgtagctgtgaagggccgtttccagctaacttcattaataaatggcgacaaccaaagtattgatatttcaaaaccaacaaggctggggaccaggactcaaagtgaagcagattatgatttggcaataaattctttaagattaatatcagcagcttataaaggcattggacataaattaaaagaaggtgagacctacttgtcacgtgacatgcagttcatgagtaaaacaatacaacatgaaggggtctactacccggcctccatcaagaaaatattaagagttggtccctggatcaacacaatattagatgatataaaaacttcaacagaaagtattggttctctaactcaagaactagaatataaaggtgaaagtttaatgagcagcctgctgctgaggaacttctggctctacagattatattcagtggatttaaaagatcattctttgtgtggaaagcagctctacagatccttaataaaagtgttaaaacatttgaagaggtgcttcaacctggagaaccttggggaatgtttggaattatttttaaatgtgcccatgcagtttggaggtgctgacccaaatgtcatctacaggagcttctacagaagaactccagattttctaacagaaagtataactcatctcatcctcattttaaaacattttagaagagatttggaattcaacaaagataatgtctccaaagctgttctttctttgctagagttcaccaagaatgattctgcagaatttgtaactttgatgagagatcctcaagcaattggtagtgagaggcaggccaagatcacttcagacatcaacagaacagctgtaacttcagtgttatcaaatgctccaaatgaaatatttagaacttcagctcttcattacagcagcacagaaaatgaattaaatggaatagcaagtggagtttctcctgtttatcctcatggtcttcgagttttatatgaaagtttacctttttataaagcagagaagattgtcaacatggtttctgggaccaagtccatcaccaacatactggagaagacatcagccatctcctacacagatataattcgagccaccaacatgatggtggagaacctcactttgctaacaagaataatgaaaccaggtgctgacacatctttggatcctgacacaatagtaataacaatattatcaaaaataataagagataaatcctgggatgttggtgatataattggtgtcacttccccatctcctgtctcctgcttcaaggtggtctacacatcaactctacaaaataattcagtagtaatagaaagatacacaacagacacctacacaagaggtaagagaggccccaccaagccctgggtgggcagcagcacacaggagaagaagtccatgcctgtctacaacagacaagttttaacaagaggacaaagagatcaaatagaaaatatagcaaagctggagtgggtgttttcttcagtagcaaatattgattctttgctaaatgagctcagcaccatgactttgggtctttctctaaggaaatgtagacaactttttccaacatatttaagtttaaacttcctgcacaggctttctgtcagcagcaggcccagagaatatccttcttctcttcctgcctacaggacaacaaattttcattttgatactggaccaataaataaagtgttaacagaaagatttggagatgaagatataaatttggtatttcaaaatgcaatatcatatggtctttccaccatgtctttggtggagcagtttactggtgtctgtccaaataaagttttgctggtgcccaagctacaagaaatacaactaatgaaagttccaatatttcaaggtggcttcaacctacaaagtataattccaataataaggcagcagcacatgttcctgcccaaccacatcactccagcccagtatattgaattatttctttcttcaaaacaatttcattcaagaataaatttaaaacacaacaacagatttaaacttgttttacaaaaagattattttaatggggagaacatgatagaaactttgtccacctgtttggcaggccactggatcatcattttgatgctaatgaaggagagtcaggggatatttgacaaggagtggtatgatggttttgtaacagaccacatgttcctggacctgcagctcttcctctcctccttcaagacatttctaactgtcttcaactttgcttatttaaaagttggttcaaatatagaagaaataacaggaaatcaagccaacctgctggagctgctggacctgggctactggaagaacatgtataaagtattttcagagaccaaggtgcggctggctttgctaaaacaagatttatcatttaattctgtgaagaacagcagcagcttccggcactggtttataaattctctacaagaagtacaatgtacttctgtgccttgggtggtaaatgtaacaagaaatccaactcatttaaaaggtgttctacagtacatgaagatgatagaaagtggcatgattcaaggttattcagcaaatatttcttcagttttaagtatcccatataattatccagacatggcgcacatgatgacaaaaataataagaaatcgaggccacatgtcctatgattatccaaagatgaagaaaagtttaactttctccatgacagacatgagtgacagctacatgctcaacctcttccccaaagtagaatgttcttacatgagtggttatttggataaactagatgatactctacaacttctaaagaaacctcctgttggaagaaaagttccttctgtggctttgccctggcaccactgcaacagatacaactttgtcttcagcagcacaggctgcaaagtttctgtcattgacatgcttccaaaacatttccgaagaagtaatttaaaagtaatatgttttattggagaaggggcgggcaacctcatgctaagagctgttttggaagttggtggaaatataaaattaatatatagatccttaaaagatcctgatgatcatcatgttcctgtagaatttctaagattaaaaccttgttatccttatattgatactggtggcagtttatctttggcttcaacagatgccaccaacaaggcccactgggattatttacatcttcactggacagatcctttaaatttaatagtatgtgatgcagaaataagtggtgtgaagcactggctaaaaattcttcacaggtggtatgagcacatgacttcctgcaagcactgtttaaaatcagaacatgataaatatttaataataaaatatcatgctcaagatgatttaatagatcttcctcatggtgtcaggctactaaaatgtaacatctgcctgggctccaaactaagtggcagtgagagctacctgctcattggtcttggtctttcaaataaacttcctgtctacagtgaagttcttcattcaaaacttcttttggcagaatgtcatcagtttcatcatccaaaatatttggatgtttctggaataaatacaaatataaaatccttaataccaatgttggattatccaataacttacaacaagatcaccactttgctagaaagtgtgcgggagctttcttcaaataaaaacaagaacaccatgtggattggaagaaatcctgtctaccataataaatggctaaagaggaaatatttcaacattttaaaatggctaaaatactgtatagaacttcctgccttcaggatggattataattcatttgagagaatagaaatgctttatccaaatttaagagatttggtagattctgtttctacttcagagctgaagaaagtaataaaagtaacaggcatcctcttcaggagcaacaccatgtgaattaatatgccaatgctaacatgtcatccccactactttttttgttcaatcactctcagtctagacatgtgagaagatcccaaacccaactgcacccctcccactcgaaatcagttgtagcctcagcagctccatctgccatgatctctgaccagcagcaaatgtattattattttaatttgtctatagttaacaaaaaattgatatctcacaggttgtaaacatagttcttttataattattgttagttaaactattgtgtttgacttcctttgggtatttttttcccgt

SEQ ID NO: 14 - DNA, 21709 bp, synthetic construct
  source 1..21709: mol_type = other DNA
acgcgaaaaaatgcataacaaaactatcaacctgaaaaaagttaggacaagtgaagattgctagtcccaaagaccagaatcatgggctgtaatgtgatgatggagcttgattatggtggacgagctgcatggctggcattccacataaccaactttgataggtcagatttggaaactatcctaagaggtgctagggtgtgcaatacatggcaagatcagagactctccgtgtaccttgtgggaagggattgcaatttgttaagaccatttgtgcaagctgccaaatttatccataatactaggagaggccaaacattaacacattggttcacaaaaaatatcgtgtttagttctacagggcaagagacagagcctcccattgaccccacatgtgagctgttggtagagctgatcagtggttaagatgacagcacattatgtagttaattaaaacaaagggtaggacaagtcctaatgtccacagctatgaacaagttcactcagaccatctctaaacctgccactatcttgaatatttcagacagtgaagagtcgggcgatgaggcaggggtgggcaaggtgtcccgtaccacacagagctcagagaggtggcttgatttgctcattgaaaagttccagccgagcctacaaaacatcactagatacatcaactggaacttcatcaggatctgcaatgataggcttaaaaaagaaaaaatggggtacattgaggccaagcaatatgtggaagacatggcttggatggtgatagcatctgaggcagacagcattgagtggaagtgcataaggaggcaggagaaagtgactggggtgaaatacccaaagttcttctttgtacaacacaaagaggactggattgagtgcacaggatgcattccgtacccaggccatgacttgatctatgatgaggatgatgatgactgagctgactcagatcactccaaccagcagagagatccatagttatagaaaaacattaggataaatacacatcctaggccgccaccatgttcgtgtttctggtgctgctgcctctggtgagctcccagtgcgtgaacctgaccacaaggacccagctgccccctgcctataccaattccttcacacggggcgtgtactatcccgacaaggtgtttagatctagcgtgctgcactccacacaggatctgtttctgcctttcttttctaacgtgacctggttccacgccatccacgtgagcggcaccaatggcacaaagcggttcgacaatccagtgctgccctttaacgatggcgtgtacttcgcctccaccgagaagtctaacatcatcagaggctggatctttggcaccacactggacagcaagacacagtccctgctgatcgtgaacaatgccaccaacgtggtcatcaaggtgtgcgagttccagttttgtaatgatccattcctgggcgtgtactatcacaagaacaataagtcttggatggagagcgagtttcgcgtgtattcctctgccaacaattgcacatttgagtacgtgtcccagcccttcctgatggacctggagggcaagcagggcaatttcaagaacctgagggagttcgtgtttaagaatatcgatggctacttcaagatctactccaagcacaccccaatcaacctggtgcgcgacctgccacagggcttctctgccctggagccactggtggatctgcccatcggcatcaacatcacccggtttcagacactgctggccctgcacagaagctacctgacaccaggcgacagctcctctggatggaccgcaggagctgccgcctactatgtgggctatctgcagcccaggaccttcctgctgaagtacaacgagaatggcaccatcacagacgccgtggattgcgccctggatcccctgtctgagaccaagtgtacactgaagagctttaccgtggagaagggcatctatcagacaagcaatttcagggtgcagcctaccgagtccatcgtgcgctttcccaatatcacaaacctgtgcccttttggcgaggtgttcaacgcaacccgcttcgccagcgtgtacgcctggaataggaagcgcatctccaactgcgtggccgactattctgtgctgtacaacagcgcctccttctctacctttaagtgctatggcgtgagccccacaaagctgaatgacctgtgctttaccaacgtgtacgccgattccttcgtgatcaggggcgacgaggtgcgccagatcgcccctggccagacaggcaagatcgccgactacaattataagctgcctgacgatttcaccggctgcgtgatcgcctggaactctaacaatctggatagcaaagtgggcggcaactacaattatctgtaccggctgtttagaaagtctaatctgaagccattcgagagggacatctccacagagatctaccaggccggctctaccccctgcaatggcgtggagggctttaactgttatttccctctgcagagctacggcttccagccaacaaacggcgtgggctatcagccctaccgcgtggtggtgctgtcttttgagctgctgcacgcacctgcaacagtgtgcggaccaaagaagagcaccaatctggtgaagaacaagtgcgtgaacttcaacttcaacggactgaccggcacaggcgtgctgaccgagtccaacaagaagttcctgccttttcagcagttcggcagggacatcgcagataccacagacgccgtgcgcgaccctcagaccctggagatcctggatatcacaccatgctccttcggcggcgtgtctgtgatcacaccaggcaccaatacaagcaaccaggtggccgtgctgtatcaggacgtgaattgtaccgaggtgcccgtggcaatccacgcagatcagctgacccctacatggcgggtgtactctaccggcagcaacgtgttccagacaagagccggatgcctgatcggagccgagcacgtgaacaatagctatgagtgcgacatccctatcggcgccggcatctgtgcctcctaccagacccagacaaactccccacggagagcccggtctgtggccagccagtccatcatcgcctataccatgagcctgggcgccgagaattccgtggcctactccaacaattctatcgccatccctaccaacttcacaatctccgtgaccacagagatcctgccagtgagcatgaccaagacatccgtggactgcacaatgtatatctgtggcgattccaccgagtgctctaacctgctgctgcagtacggctctttttgtacccagctgaatagagccctgacaggcatcgccgtggagcaggacaagaacacacaggaggtgttcgcccaggtgaagcagatctacaagaccccacccatcaaggactttggcggcttcaacttcagccagatcctgcccgatcctagcaagccatccaagcggtcttttatcgaggacctgctgttcaacaaggtgaccctggccgatgccggcttcatcaagcagtatggcgattgcctgggcgacatcgccgccagagacctgatctgtgcccagaagtttaatggcctgaccgtgctgcctccactgctgacagatgagatgatcgcccagtacacatctgccctgctggccggcaccatcacaagcggatggaccttcggcgcaggagccgccctgcagatcccctttgccatgcagatggcctatcggttcaacggcatcggcgtgacccagaatgtgctgtacgagaaccagaagctgatcgccaatcagtttaactccgccatcggcaagatccaggactctctgagctccacagccagcgccctgggcaagctgcaggatgtggtgaatcagaacgcccaggccctgaataccctggtgaagcagctgtctagcaacttcggcgccatctcctctgtgctgaatgatatcctgagcaggctggacaaggtggaggcagaggtgcagatcgaccggctgatcacaggcagactgcagtccctgcagacctacgtgacacagcagctgatcagggcagcagagatcagggcctctgccaatctggccgccaccaagatgagcgagtgcgtgctgggccagtccaagagagtggacttttgtggcaagggctatcacctgatgagcttcccacagtccgcccctcacggagtggtgtttctgcacgtgacctacgtgccagcccaggagaagaacttcaccacagcaccagcaatctgccacgatggcaaggcacactttcctagggagggcgtgttcgtgagcaacggcacccactggtttgtgacacagcgcaatttctacgagccacagatcatcaccacagacaatacattcgtgtccggcaactgtgacgtggtcatcggcatcgtgaacaataccgtgtatgatcctctgcagccagagctggactcttttaaggaggagctggataagtacttcaagaatcacaccagccccgacgtggatctgggcgacatctctggcatcaatgccagcgtggtgaacatccagaaggagatcgacaggctgaacgaggtggccaagaatctgaacgagtccctgatcgatctgcaggagctgggcaagtatgagcagtacatcaagtggatcctgaccacactgctgttcgtggtcatgctgatcatcatcatggccgtgatcggctttatcctgtacaaggtgctgaagatgatccgggacaacaagctgaagagcaagtccacccccggcctgacagtgctgtcttgatagccacctatagcaagtgatgtagtatttagtctatgattagttatagaaaaacattaggataaatacacatcctaggccgggccaaaatgtctctagacagattgaagctcaatgatgtctcaaacaaggatagcctgctgtccaactgcaaatacagtgttaccagatccacaggcgatgtaaccagtgtgtctggtcatgctatgcagaaagcccttgcaaggacactcggcatgttcttacttactgccttcaaccgttgcgaagaagtggcagaaatagggctccaatatgccatgtccttgctaggcagagatgatagcatcaagatattaagagaagccggctacaatgtaaaatgtgtggacacacagctcaaggactttacaatcaaattacaaggaaaggaatacaaaatacaagtcctagatatagtgggaatagatgcagccaatttagctgatctagagatacaagccagaggagtggtagcaaaagaactcaaaacaggagccaggctacctgacaatcggaggcatgatgcaccagattgtggtgtgatagttctctgtattgcagcattagttgtttccaaattagctgcaggggacaggggaggacttgatgctgtggaaagaagggctttaaatgtgctgaaagccgagaaagccaggtaccccaacatggaggtcaagcagatagctgaaagtttttatgatctgtttgaaaggaagccttattacattgatgtcttcatcacttttggcctggcccagtctagtgtcaagggaggcagcaaagttgaggggctgttttcaggtctcttcatgaatgcatacggggcaggacaagttatgctgaggtggggtttactggcaaaatctgtcaagaacatcatgctaggccatgctagtgtacaagctgagatggaacaggtggttgaggtttacgaatatgctcagaagcaaggaggggaggcaggattctatcacatcagaaataatccaaaagcttcacttctctctttgaccaattgtcctaatttcaccagtgttgtgcttggcaatgctgcaggtttaggcatcatagggtcatataagggtgctcctaggaatagagaactctttgatgctgccaaagattatgcagaaagattaaaggacaacaatgtaattaactacagtgcattaaacttgactgcagaagaaagagagctgatcagccagcagctgaacattgttgatgacactcctgatgatgatatttaattaaaactggaaaatgtaggataaatatggagaaattcgcccccgaatttgttggcgaggatgctaacaagaaggcagaggagtttctcaaacatagatccttcccttcggaaaaaccactagctggtataccgaacactgccactcatgtcaccaaatataacatgccccctatattgcgtagctcattcaaactcccttccccgagagttgctgcaaatcttactgaaccctctgctccccctaccactccaccacccacacctccccagaacaaggaagagcagcccaaagagtctgatgttgacattgagactatgcatgtctgtaaggttcctgacaatccggaacacagcaagaagccatgctgctcagatgataccgatactaagaaaactaggaagccgatggtcacctttgtggaacccgaggagaaatttgtcggattgggagctagcttgtacagggagaccatgcagacctttgctgctgatggttatgatgaagaaagcaacctatcgtttgaggagactaaccaagagccgggttcttcatctgtagaacaaagactagatagaatagaggagaaattgtcctacataataggccttttaaacaccataatggtagcgactgctggacctaccactgctagagatgagattagagatgcccttataggcactagagaagaacttattgagatgatcaagtctgacatcttgactgtcaatgacagaatagtggccatggagaagctcagagatgaggaatgctccagagctgacactgatgatggatcagcctgttatttaacagacagagcaaggatactagataagatagtgtccagcaatgctgaagaggctaaggaagatttggatgttgatgacatcatgggcattaatttttagttaattaaaataacaacaggacaaataatggaggcctacttggtagagatgtaccatggtgtcccatatacagctgcagtacagctaaacttggttgaaaaacattcagccaacatatcactaactgtgtggataccgatgtttcaaacatctctaccaaagaactccgttatggacctgctacatgatgttacagtcatttgtacacagatatcaacagtgcatggtcccatgatcaaggtagatctgagctcttccaatgcaggtttagctaccatgccaaggcaattcttgataaatgctatcatagctttggatgactggggcaacatggattacgaagtgcctgttgcttttgataaaaagagcttctgtgtgacaattcttaagcctaaaaacatgctttacactgtacccagcattactcccactaatcgacctactcatgagctgatagctgtctgctctttccataacagggtaacattaaagtcattcaatatacctgtcttcatcagagcactgtctatcagacagcaggaccttgatagtgtggagcaggctataagctccgatgtggaccatgctataacaacagctagggtggctccctatgcagggcttacacttgtgatcaacatcacatccaccaaaggagcattcaaactgctaaaggcaggtagtcagattcttgcagaactgggtccctatctgacgcaggtgagcctacatgatgtgattatgaactggaaacatacaggcacttcctacatactcaagagctcctcaacaagtggatgaaaaagagaaagtcaccattgatcagctcaatccacaactacaaccccacgatttcacacagcacaacaaccaccgccaccaacatccacatgacaaccacacatacacacccacatacatatatacacatatcttagttaaataaaatcaggataaataatggatcctaacatgacctcacaccagatcaccctcgagatcaacatgaccagcagccgtattggcacatacactacaccagccccaacagctcttctccttgcatgtgccgtcatcaacacagtgtgtgcgctgataatggcctgcagcagtagaagcactgccacatcaggcattgtcagcagccaatgcacagttcatcccaatcaccctccaccaagttatggcgtcaatgtaactggtctgccgggtaacctatactcaaggaacactacataacattataaataacagaaattatccttcaataaaccccaggccagacagctttaccctgctagacgattcaatcagcccttgcagtatgtcgtctagttaacaaaaaaccggtaggataagtactatcctattggaaccaaacgagacctgtagagcagctcacacaagagaaccacaagctgacttcacctagtatgggaaggaacttagaagtgagtggcagcattaccaatttgaactttgagagaactcagcatcctgacacatttaggactgttgtaaaagtgaaccaaatgtgtaagcttattgcaggtgtgctcacaagtgctgctgtggcagtttgtgtgggggtcataatgtattctgttttcacatcaaaccacaaggccaactccacgcagaatgccacgacccggaacagcacatccacccctccccaaccaaccgccggtctgcccaccacagagcaagggaccatccccagattcaccaaaccccccaccaaaaccgccacccaccatgagatcacagagcccgtcaaaatggcaacaccttcagaggatccctaccaatgctccagcaatggttatttggaccgacctgatttacctgaaaatttcaaactcgtattggatgttatatgcaagcctccaggtcctgaacatcacaacaccagctgttatgagaaacgtgaaatcaacccaggaagtgtttgccctgatcttgtaacaatgaaggcaaacatgggcttaaacaatggtggtggggaggatgctgcaccttatatagaggttaccaccctttctacgtactccaacaaaagggcaatgtgtgtccacaatgggtgtgatcaaggcttctgtttcttcctttctggtttaagcactgatcaggagagagctgtgctagagcttggaggtcaacaggctatcatggagttgcattatgattcctactggaaacactattggagtaactctaattgtgttgttcccagaacaaactgcaacctgacagaccaaactgagattttgtttcctaggtttaacaacaagaatcagtctcagtgtaccacctgtgcagattcagctggcctagataacaaattttatctcacatgtgatgggcttttaagaaccctccctctagttggactacccagcctaagtcctcaggcttacaaagctgtacccacacaaactacaggcaccaccacggcaccaacatcagagacgaggcacccaacccctgcacccaggaggtccaaacctctcagtcggaagaagagagctttatgtggtgtagactcaagcagagaacccaaaccaacaatgccttactggtgtcctatgctccaattatttccaaggaggtctaattcttaagtgacctattcctgaattaacttcagaataagtaccaaccttatcagtagttaatgaaaactaagctttgatataataggacaaatatgattcctggcaggatctttctagtccttctggtgatcttcaacaccaagccaattcacccaaatacattaacagaaaaattctatgagtccacatgtagtgttgagactgcaggttataagagtgcccttagaacaggttggcatatgacagttatgtcaattaagttgtctcaaataaatattgagtcatgcaagagcagcaactcgttattggctcatgagcttgcaatctatagtagtgcagtggatgaattgagaacgttatcatccaatgccttgaagtccaaaaggaagaagaggttcctcggtttgattcttggtctcggagctgcagtcactgccggggtggctttagccaagacagtgcaacttgaaagtgagattgcattgattagagatgcagtgagaaatacaaatgaggctgttgttagcctaaccaacggcatgtcagtgttggctaaagtggtggatgatttgaaaaacttcatatctaaagaattactcccaaaaataaaccgagtctcttgtgatgtgcacgacatcactgccgtcattagattccaacagctcaacaaaagacttttggaagtatctcgtgaattttcatctaatgcaggattaacacacactgtttcatcttttatgttaacagaccgggaactcacctccattgtaggcggcatggctgtttcagcaggccaaaaagagataatgctatctagcaaagctataatgagaagaaatgggttagcaatattaagttcagtcaacgctgacacactggtttatgtaatacaactcccattatttggtgttatggacacagattgttgggtaataagaagttctatagactgtcataacatagcagacaagtatgcttgtttggctagagctgataatggctggtattgtcacaatgctggctcattatcatacttcccgtcgccaacggattgtgagatccacaatgggtatgctttctgtgacactctaaaaagtctaactgtacctgtaacatcacgagaatgcaactcaaacatgtataccactaactacgattgtaagatttccacaagtaaaacttatgtgagtacagcggtactgactacaatgggttgcttggtatcttgttatggtcataacagttgcacagtcatcaataatgacaaaggtataataaggactctgccagatggttgccactacatctccaacaaaggtgtggacagggttcaagtaggtaacactgtttactatcttagcaaagaagttggcaagtcaattgttgtcagaggggaaccattggtcttgaaatatgaccctttgagtttccctgacgataaatttgatgttgctataagagatgtggagcatagcatcaatcagacacgcacattcttgaaggcctctgatcagttattggacttaagtgaaaacagagagaataaaaatttaaacaagtcatatatactaacaactctgctcttcgttgtaatgcttattataataatggctgtcatagggttcattctgtataaggtattgaaaatgatcagagacaacaagttgaaatccaaaagtacacctggcctcacagttttatcatgacaattgtaccaaaccataattgagttagttaattaaaaacttaggataagtgacaatccagacccaacacctctttcaactctcaaggataaggtaggatgagtgtgagaccttgcaaatttgaggttcaagggttttgttccagagggaggaattgcaagtatagtcataaatattgggaatggcctttgaaaactcttatgctcaggcagaactacatgcttaataggatttataggttcctcgacaccaacacagatgcaatgtcagatgtcagcggatttgatgcaccacaaaggactgctgagtatgccttgggaaccataggtgtgctgaaaagttacctggaaaaaactaacaacatcactaaatcaatagcttgtggcagtttgatcactgtattgcagaacttggatgttggtctagtaatacaagcaagagatagcaacactgaggacaccaattacttgagaagttgcaacactatactgtcttatatagacaagatacacaagaagagacaaattattcacattctcaaaagactgccagtaggagtactatgcaatctgatccaatctgtcatctccatcgaggagaagataaattcttctatgaaaacagaatgataaggctgcctaaatactatccagccatactgcataagatgtatattattagagtaaatagaaacctcacttacgatgggtctggaccatccacaataatagatgcaggaaagtctgtggtgtggaatcgtgttgatgtgatagcttgtgtgaaagaggccttgtgctgcatagaattcagctggaataaccaagtgatcatagactttgattatagccaggccagatgatgtggactgtattcctttttttgtcagtaatcagttattaacccaaaattgttaattatgtagactttaagttaactaacttcatgttaattcaatagttatataaaaaaatattcgaattaggatcaatatggatcctattgatgaacaagaagttaatgtgtacttgccggatagctacttaaagggtgttatatcttttagtgaaactaatgctcttggcagctgtatcattggtagacctttcttgaaggatgactttactgccactacttcaatccgtaaccccctaattgaacataaaagaataagggacactaaattagtaaaaaatattgtttcaaaccctcaatataggttagtggagcctctccaaatgcagcatgagctcttgagtgtactatcgcccaatttcatattgcacactgccaacttaaggaaaattatacaaagaagtgttgacataacagataaaaagttgaaccccattttgcacattttgaatcttaattctcctaaccaagagggtaaggtgtcggaacggctaactaggctaattaagaaacatctctctcacatacctaattgggtaagcagctggtacaatatatgggtcaatcttaacaacttactgcaggagtaccgttcaaaggaagttatagaccataactgtgttctgactaggcaattgtctggaagtttcatacatgtggtcatgagtcaatatggagttgtgataattagcaaaaaaagtaaaagatatacaatgtgtacttataaccaattcctaacctggaaggaccttgccttgagcagatttaatgccaattatgtggtctggctaagtaatgtgttaaacacactcaacgaggggttgggattaaggtgtagattaaaaggtcatctgctcagtaagttgtacatttccactgacatctttttatcttcaacatctaatgaattttataatgtggtcaaggaatttgagggcttcatcatgtcactgatattgaaacaaactgaggaagccttatttagcacaaggttttataataacatgttgaacaacttaattgatgccattgatagggctcgactagagtatctggcccgctgtgccaattcagctgccaggattaatttacctagtacagatgttatgatagcatcattgggtgatatcttatctttgataaacgttttaggtgaatccaaccttaacaacttaagtgagttatattttatcttcaggatatttggtcaccctatggttgatgagaggaaggccatggatgcagtcagagataactgttgtgaaacaaagtttctgacggctaagaaccttgcatcgttaagaggagcatatgtttatagaattatcaaaggattcgtagcaaattataacaggtggccttacataaaaactagagtttgccttacaccaacatggattaactatcttgacaccaattcatgtccctcattattagagatgacagaagatgattttattgtgttagctggagtgcactttataagagaattccacatcccaaagctaactgatctggagattatattaaatgacaaggccatatctcctccaaaatcactcatttggtcatgctttccaaaaaactacatacctcaggttatacaagatgagtatgcccggaggtattgtagagctaaagcacctttgaagacaagacgtgtcttggagttctacttacaggacaaggatttcaagttggatcagctccatagagtagtagtgaaccaggactaccttaatgataaagaacatataatttctttaacaggaaaagaaagagagttgggtgttggtaggatgtttgccatgcaacctgggaagcagaggcaagtccaaattttagcagagaagctgttggctgataacatcctgcaattctttccggagacactgactagatacggtgatttggagctgcaaaagatactagagttaaaagctggactttcaaataaaaatgacagatctaaagactcctacaataattatataagtaggtgctcattaattactgatttaagtaaatttaaccaagcttttaggtacgagtcatcctgtgtgtgtagtgatcttttagatgagctacatgggactcaaagcttattctcttggctgcatttaacagtaccactgactactataatgtgtacatataggcatgcgccgccggacactggaaacaactataatgtagatgatattgctgagcagagtggactctaccgctaccacatgggcgggattgagggctggtgccagaagctctggacaacagaggccattgctttgctagatactgtagctgtgaagggccgtttccagctaacttcattaataaatggcgacaaccaaagtattgatatttcaaaaccaacaaggctggggaccaggactcaaagtgaagcagattatgatttggcaataaattctttaagattaatatcagcagcttataaaggcattggacataaattaaaagaaggtgagacctacttgtcacgtgacatgcagttcatgagtaaaacaatacaacatgaaggggtctactacccggcctccatcaagaaaatattaagagttggtccctggatcaacacaatattagatgatataaaaacttcaacagaaagtattggttctctaactcaagaactagaatataaaggtgaaagtttaatgagcagcctgctgctgaggaacttctggctctacagattatattcagtggatttaaaagatcattctttgtgtggaaagcagctctacagatccttaataaaagtgttaaaacatttgaagaggtgcttcaacctggagaaccttggggaatgtttggaattatttttaaatgtgcccatgcagtttggaggtgctgacccaaatgtcatctacaggagcttctacagaagaactccagattttctaacagaaagtataactcatctcatcctcattttaaaacattttagaagagatttggaattcaacaaagataatgtctccaaagctgttctttctttgctagagttcaccaagaatgattctgcagaatttgtaactttgatgagagatcctcaagcaattggtagtgagaggcaggccaagatcacttcagacatcaacagaacagctgtaacttcagtgttatcaaatgctccaaatgaaatatttagaacttcagctcttcattacagcagcacagaaaatgaattaaatggaatagcaagtggagtttctcctgtttatcctcatggtcttcgagttttatatgaaagtttacctttttataaagcagagaagattgtcaacatggtttctgggaccaagtccatcaccaacatactggagaagacatcagccatctcctacacagatataattcgagccaccaacatgatggtggagaacctcactttgctaacaagaataatgaaaccaggtgctgacacatctttggatcctgacacaatagtaataacaatattatcaaaaataataagagataaatcctgggatgttggtgatataattggtgtcacttccccatctcctgtctcctgcttcaaggtggtctacacatcaactctacaaaataattcagtagtaatagaaagatacacaacagacacctacacaagaggtaagagaggccccaccaagccctgggtgggcagcagcacacaggagaagaagtccatgcctgtctacaacagacaagttttaacaagaggacaaagagatcaaatagaaaatatagcaaagctggagtgggtgttttcttcagtagcaaatattgattctttgctaaatgagctcagcaccatgactttgggtctttctctaaggaaatgtagacaactttttccaacatatttaagtttaaacttcctgcacaggctttctgtcagcagcaggcccagagaatatccttcttctcttcctgcctacaggacaacaaattttcattttgatactggaccaataaataaagtgttaacagaaagatttggagatgaagatataaatttggtatttcaaaatgcaatatcatatggtctttccaccatgtctttggtggagcagtttactggtgtctgtccaaataaagttttgctggtgcccaagctacaagaaatacaactaatgaaagttccaatatttcaaggtggcttcaacctacaaagtataattccaataataaggcagcagcacatgttcctgcccaaccacatcactccagcccagtatattgaattatttctttcttcaaaacaatttcattcaagaataaatttaaaacacaacaacagatttaaacttgttttacaaaaagattattttaatggggagaacatgatagaaactttgtccacctgtttggcaggccactggatcatcattttgatgctaatgaaggagagtcaggggatatttgacaaggagtggtatgatggttttgtaacagaccacatgttcctggacctgcagctcttcctctcctccttcaagacatttctaactgtcttcaactttgcttatttaaaagttggttcaaatatagaagaaataacaggaaatcaagccaacctgctggagctgctggacctgggctactggaagaacatgtataaagtattttcagagaccaaggtgcggctggctttgctaaaacaagatttatcatttaattctgtgaagaacagcagcagcttccggcactggtttataaattctctacaagaagtacaatgtacttctgtgccttgggtggtaaatgtaacaagaaatccaactcatttaaaaggtgttctacagtacatgaagatgatagaaagtggcatgattcaaggttattcagcaaatatttcttcagttttaagtatcccatataattatccagacatggcgcacatgatgacaaaaataataagaaatcgaggccacatgtcctatgattatccaaagatgaagaaaagtttaactttctccatgacagacatgagtgacagctacatgctcaacctcttccccaaagtagaatgttcttacatgagtggttatttggataaactagatgatactctacaacttctaaagaaacctcctgttggaagaaaagttccttctgtggctttgccctggcaccactgcaacagatacaactttgtcttcagcagcacaggctgcaaagtttctgtcattgacatgcttccaaaacatttccgaagaagtaatttaaaagtaatatgttttattggagaaggggcgggcaacctcatgctaagagctgttttggaagttggtggaaatataaaattaatatatagatccttaaaagatcctgatgatcatcatgttcctgtagaatttctaagattaaaaccttgttatccttatattgatactggtggcagtttatctttggcttcaacagatgccaccaacaaggcccactgggattatttacatcttcactggacagatcctttaaatttaatagtatgtgatgcagaaataagtggtgtgaagcactggctaaaaattcttcacaggtggtatgagcacatgacttcctgcaagcactgtttaaaatcagaacatgataaatatttaataataaaatatcatgctcaagatgatttaatagatcttcctcatggtgtcaggctactaaaatgtaacatctgcctgggctccaaactaagtggcagtgagagctacctgctcattggtcttggtctttcaaataaacttcctgtctacagtgaagttcttcattcaaaacttcttttggcagaatgtcatcagtttcatcatccaaaatatttggatgtttctggaataaatacaaatataaaatccttaataccaatgttggattatccaataacttacaacaagatcaccactttgctagaaagtgtgcgggagctttcttcaaataaaaacaagaacaccatgtggattggaagaaatcctgtctaccataataaatggctaaagaggaaatatttcaacattttaaaatggctaaaatactgtatagaacttcctgccttcaggatggattataattcatttgagagaatagaaatgctttatccaaatttaagagatttggtagattctgtttctacttcagagctgaagaaagtaataaaagtaacaggcatcctcttcaggagcaacaccatgtgaattaatatgccaatgctaacatgtcatccccactactttttttgttcaatcactctcagtctagacatgtgagaagatcccaaacccaactgcacccctcccactcgaaatcagttgtagcctcagcagctccatctgccatgatctctgaccagcagcaaatgtattattattttaatttgtctatagttaacaaaaaattgatatctcacaggttgtaaacatagttcttttataattattgttagttaaactattgtgtttgacttcctttgggtatttttttcccgtgggtcggcatggcatctccacctcctcgcggtccgacctgggcatccgaaggaggacgcacgtccactcggatggctaagggagagcctgcagtagcataaccccttggggcctctaaacgggtcttgaggggttttttgctgaaaggaggaactatatacgcgtcgacgggcccgcgctcactggccgtcgttttacaacgtcgtgactgggaaaaccctggcgttacccaacttaatcgccttgcagcacatccccctttcgccagctggcgtaatagcgaagaggcccgcaccgatcgcccttcccaacagttgcgcagcctgaatggcgaatgggacgcgccctgtagcggcgcattaagcgcggcgggtgtggtggttacgcgcagcgtgaccgctacacttgccagcgccctagcgcccgctcctttcgctttcttcccttcctttctcgccacgttcgccggctttccccgtcaagctctaaatcgggggctccctttagggttccgatttagtgctttacggcacctcgaccccaaaaaacttgattagggtgatggttcacgtagtgggccatcgccctgatagacggtttttcgccctttgacgttggagtccacgttctttaatagtggactcttgttccaaactggaacaacactcaaccctatctcggtctattcttttgatttataagggattttgccgatttcggcctattggttaaaaaatgagctgatttaacaaaaatttaacgcgaattttaacaaaatattaacgcttacaatttaggtggcacttttcggggaaatgtgcgcggaacccctatttgtttatttttctaaatacattcaaatatgtatccgctcatgagacaataaccctgataaatgcttcaataatattgaaaaaggaagagtatgagtattcaacatttccgtgtcgcccttattcccttttttgcggcattttgccttcctgtttttgctcacccagaaacgctggtgaaagtaaaagatgctgaagatcagttgggtgcacgagtgggttacatcgaactggatctcaacagcggtaagatccttgagagttttcgccccgaagaacgttttccaatgatgagcacttttaaagttctgctatgtggcgcggtattatcccgtattgacgccgggcaagagcaactcggtcgccgcatacactattctcagaatgacttggttgagtactcaccagtcacagaaaagcatcttacggatggcatgacagtaagagaattatgcagtgctgccataaccatgagtgataacactgcggccaacttacttctgacaacgatcggaggaccgaaggagctaaccgcttttttgcacaacatgggggatcatgtaactcgccttgatcgttgggaaccggagctgaatgaagccataccaaacgacgagcgtgacaccacgatgcctgtagcaatggcaacaacgttgcgcaaactattaactggcgaactacttactctagcttcccggcaacaattaatagactggatggaggcggataaagttgcaggaccacttctgcgctcggcccttccggctggctggtttattgctgataaatctggagccggtgagcgtgggtctcgcggtatcattgcagcactggggccagatggtaagccctcccgtatcgtagttatctacacgacggggagtcaggcaactatggatgaacgaaatagacagatcgctgagataggtgcctcactgattaagcattggtaactgtcagaccaagtttactcatatatactttagattgatttaaaacttcatttttaatttaaaaggatctaggtgaagatcctttttgataatctcatgaccaaaatcccttaacgtgagttttcgttccactgagcgtcagaccccgtagaaaagatcaaaggatcttcttgagatcctttttttctgcgcgtaatctgctgcttgcaaacaaaaaaaccaccgctaccagcggtggtttgtttgccggatcaagagctaccaactctttttccgaaggtaactggcttcagcagagcgcagataccaaatactgtccttctagtgtagccgtagttaggccaccacttcaagaactctgtagcaccgcctacatacctcgctctgctaatcctgttaccagtggctgctgccagtggcgataagtcgtgtcttaccgggttggactcaagacgatagttaccggataaggcgcagcggtcgggctgaacggggggttcgtgcacacagcccagcttggagcgaacgacctacaccgaactgagatacctacagcgtgagctatgagaaagcgccacgcttcccgaagggagaaaggcggacaggtatccggtaagcggcagggtcggaacaggagagcgcacgagggagcttccagggggaaacgcctggtatctttatagtcctgtcgggtttcgccacctctgacttgagcgtcgatttttgtgatgctcgtcaggggggcggagcctatggaaaaacgccagcaacgcggcctttttacggttcctggccttttgctggccttttgctcacatgttctttcctgcgttatcccctgattctgtggataaccgtattaccgcctttgagtgagctgataccgctcgccgcagccgaacgaccgagcgcagcgagtcagtgagcgaggaagcggaagagcgcccaatacgcaaaccgcctctccccgcgcgttggccgattcattaatgcagctggcacgacaggtttcccgactggaaagcgggcagtgagcgcaacgcaattaatgtgagttagctcactcattaggcaccccaggctttacactttatgcttccggctcgtatgttgtgtggaattgtgagcggataacaatttcacacaggaaacagctatgaccatgattacgccaagcgcgcccgggtaatacgactcactataggg

SEQ ID NO: 15 - DNA, 18758 bp, synthetic construct
  source 1..18758: mol_type = other DNA
acgcgaaaaaatgcataacaaaactatcaacctgaaaaaagttaggacaagtgaagattgctagtcccaaagaccagaatcatgggctgtaatgtgatgatggagcttgattatggtggacgagctgcatggctggcattccacataaccaactttgataggtcagatttggaaactatcctaagaggtgctagggtgtgcaatacatggcaagatcagagactctccgtgtaccttgtgggaagggattgcaatttgttaagaccatttgtgcaagctgccaaatttatccataatactaggagaggccaaacattaacacattggttcacaaaaaatatcgtgtttagttctacagggcaagagacagagcctcccattgaccccacatgtgagctgttggtagagctgatcagtggttaagatgacagcacattatgtagttaattaaaacaaagggtaggacaagtcctaatgtccacagctatgaacaagttcactcagaccatctctaaacctgccactatcttgaatatttcagacagtgaagagtcgggcgatgaggcaggggtgggcaaggtgtcccgtaccacacagagctcagagaggtggcttgatttgctcattgaaaagttccagccgagcctacaaaacatcactagatacatcaactggaacttcatcaggatctgcaatgataggcttaaaaaagaaaaaatggggtacattgaggccaagcaatatgtggaagacatggcttggatggtgatagcatctgaggcagacagcattgagtggaagtgcataaggaggcaggagaaagtgactggggtgaaatacccaaagttcttctttgtacaacacaaagaggactggattgagtgcacaggatgcattccgtacccaggccatgacttgatctatgatgaggatgatgatgactgagctgactcagatcactccaaccagcagagagatccaccacctatagcaagtgatgtagtatttagtctatgattagttatagaaaaacattaggataaatacacatcctaggccgggccaaaatgtctctagacagattgaagctcaatgatgtctcaaacaaggatagcctgctgtccaactgcaaatacagtgttaccagatccacaggcgatgtaaccagtgtgtctggtcatgctatgcagaaagcccttgcaaggacactcggcatgttcttacttactgccttcaaccgttgcgaagaagtggcagaaatagggctccaatatgccatgtccttgctaggcagagatgatagcatcaagatattaagagaagccggctacaatgtaaaatgtgtggacacacagctcaaggactttacaatcaaattacaaggaaaggaatacaaaatacaagtcctagatatagtgggaatagatgcagccaatttagctgatctagagatacaagccagaggagtggtagcaaaagaactcaaaacaggagccaggctacctgacaatcggaggcatgatgcaccagattgtggtgtgatagttctctgtattgcagcattagttgtttccaaattagctgcaggggacaggggaggacttgatgctgtggaaagaagggctttaaatgtgctgaaagccgagaaagccaggtaccccaacatggaggtcaagcagatagctgaaagtttttatgatctgtttgaaaggaagccttattacattgatgtcttcatcacttttggcctggcccagtctagtgtcaagggaggcagcaaagttgaggggctgttttcaggtctcttcatgaatgcatacggggcaggacaagttatgctgaggtggggtttactggcaaaatctgtcaagaacatcatgctaggccatgctagtgtacaagctgagatggaacaggtggttgaggtttacgaatatgctcagaagcaaggaggggaggcaggattctatcacatcagaaataatccaaaagcttcacttctctctttgaccaattgtcctaatttcaccagtgttgtgcttggcaatgctgcaggtttaggcatcatagggtcatataagggtgctcctaggaatagagaactctttgatgctgccaaagattatgcagaaagattaaaggacaacaatgtaattaactacagtgcattaaacttgactgcagaagaaagagagctgatcagccagcagctgaacattgttgatgacactcctgatgatgatatttaattaaaactggaaaatgtaggataaatagccgccaccatgtttgtttttcttgttttattgccactagtctctagtcagtgtgttaatcttacaaccagaactcaattaccccctgcatacactaattctttcacacgtggtgtttattaccctgacaaagttttcagatcctcagttttacattcaactcaggacttgttcttacctttcttttccaatgttacttggttccatgctatacatgtctctgggaccaatggtactaagaggtttgataaccctgtcctaccatttaatgatggtgtttattttgcttccactgagaagtctaacataataagaggctggatttttggtactactttagattcgaagacccagtccctacttattgttaataacgctactaatgttgttattaaagtctgtgaatttcaattttgtaatgatccatttttgggtgtttattaccacaaaaacaacaaaagttggatggaaagtgagttcagagtttattctagtgcgaataattgcacttttgaatatgtctctcagccttttcttatggaccttgaaggaaaacagggtaatttcaaaaatcttagggaatttgtgtttaagaatattgatggttattttaaaatatattctaagcacacgcctattaatttagtgcgtgatctccctcagggtttttcggctttagaaccattggtagatttgccaataggtattaacatcactaggtttcaaactttacttgctttacatagaagttatttgactcctggtgattcttcttcaggttggacagctggtgctgcagcttattatgtgggttatcttcaacctaggacttttctattaaaatataatgaaaatggaaccattacagatgctgtagactgtgcacttgaccctctctcagaaacaaagtgtacgttgaaatccttcactgtagaaaaaggaatctatcaaacttctaactttagagtccaaccaacagaatctattgttagatttcctaatattacaaacttgtgcccttttggtgaagtttttaacgccaccagatttgcatctgtttatgcttggaacaggaagagaatcagcaactgtgttgctgattattctgtcctatataattccgcatcattttccacttttaagtgttatggagtgtctcctactaaattaaatgatctctgctttactaatgtctatgcagattcatttgtaattagaggtgatgaagtcagacaaatcgctccagggcaaactggaaagattgctgattataattataaattaccagatgattttacaggctgcgttatagcttggaattctaacaatcttgattctaaggttggtggtaattataattacctgtatagattgtttaggaagtctaatctcaaaccttttgagagagatatttcaactgaaatctatcaggccggtagcacaccttgtaatggtgttgaaggttttaattgttactttcctttacaatcatatggtttccaacccactaatggtgttggttaccaaccatacagagtagtagtactttcttttgaacttctacatgcaccagcaactgtttgtggacctaaaaagtctactaatttggttaaaaacaaatgtgtcaatttcaacttcaatggtttaacaggcacaggtgttcttactgagtctaacaaaaagtttctgcctttccaacaatttggcagagacattgctgacactactgatgctgtccgtgatccacagacacttgagattcttgacattacaccatgttcttttggtggtgtcagtgttataacaccaggaacaaatacttctaaccaggttgctgttctttatcaggatgttaactgcacagaagtccctgttgctattcatgcagatcaacttactcctacttggcgtgtttattctacaggttctaatgtttttcaaacacgtgcaggctgtttaataggggctgaacatgtcaacaactcatatgagtgtgacatacccattggtgcaggtatatgcgctagttatcagactcagactaattctcctcggcgggcacgtagtgtagctagtcaatccatcattgcctacactatgtcacttggtgcagaaaattcagttgcttactctaataactctattgccatacccacaaattttactattagtgttaccacagaaattctaccagtgtctatgaccaagacatcagtagattgtacaatgtacatttgtggtgattcaactgaatgcagcaatcttttgttgcaatatggcagtttttgtacacaattaaaccgtgctttaactggaatagctgttgaacaagacaaaaacacccaagaagtttttgcacaagtcaaacaaatttacaaaacaccaccaattaaagattttggtggttttaatttttcacaaatattaccagatccatcaaaaccaagcaagaggtcatttattgaagatctacttttcaacaaagtgacacttgcagatgctggcttcatcaaacaatatggtgattgccttggtgatattgctgctagagacctcatttgtgcacaaaagtttaacggccttactgttttgccacctttgctcacagatgaaatgattgctcaatacacttctgcactgttagcgggtacaatcacttctggttggacctttggtgcaggtgctgcattacaaataccatttgctatgcaaatggcttataggtttaatggtattggagttacacagaatgttctctatgagaaccaaaaattgattgccaaccaatttaatagtgctattggcaaaattcaagactcactttcttccacagcaagtgcacttggaaaacttcaagatgtggtcaaccaaaatgcacaagctttaaacacgcttgttaaacaacttagctccaattttggtgcaatttcaagtgttttaaatgatatcctttcacgtcttgacaaagttgaggctgaagtgcaaattgataggttgatcacaggcagacttcaaagtttgcagacatatgtgactcaacaattaattagagctgcagaaatcagagcttctgctaatcttgctgctactaaaatgtcagagtgtgtacttggacaatcaaaaagagttgatttttgtggaaagggctatcatcttatgtccttccctcagtcagcacctcatggtgtagtcttcttgcatgtgacttatgtccctgcacaagaaaagaacttcacaactgctcctgccatttgtcatgatggaaaagcacactttcctcgtgaaggtgtctttgtttcaaatggcacacactggtttgtaacacaaaggaatttttatgaaccacaaatcattactacagacaacacatttgtgtctggtaactgtgatgttgtaataggaattgtcaacaacacagtttatgatcctttgcaacctgaattagactcattcaaggaggagttggataagtattttaagaatcatacatcaccagatgttgatttaggtgacatctctggcattaatgcttcagttgtaaacattcaaaaagaaattgaccgcctcaatgaggttgccaagaatttaaatgaatctctcatcgatctccaagaacttggaaagtatgagcagtacatcaagtggccatggtacatttggctaggttttatagctggcttgattgccatagtaatggtgacaattatgctttgctgtatgaccagttgctgtagttgtctcaagggctgttgttcttgtggatcctgctgcaaatttgatgaagacgactctgagccagtgctcaaaggagtcaaattacattacacataatgatatttaattaaaactggaaaatgtaggataaatatggagaaattcgcccccgaatttgttggcgaggatgctaacaagaaggcagaggagtttctcaaacatagatccttcccttcggaaaaaccactagctggtataccgaacactgccactcatgtcaccaaatataacatgccccctatattgcgtagctcattcaaactcccttccccgagagttgctgcaaatcttactgaaccctctgctccccctaccactccaccacccacacctccccagaacaaggaagagcagcccaaagagtctgatgttgacattgagactatgcatgtctgtaaggttcctgacaatccggaacacagcaagaagccatgctgctcagatgataccgatactaagaaaactaggaagccgatggtcacctttgtggaacccgaggagaaatttgtcggattgggagctagcttgtacagggagaccatgcagacctttgctgctgatggttatgatgaagaaagcaacctatcgtttgaggagactaaccaagagccgggttcttcatctgtagaacaaagactagatagaatagaggagaaattgtcctacataataggccttttaaacaccataatggtagcgactgctggacctaccactgctagagatgagattagagatgcccttataggcactagagaagaacttattgagatgatcaagtctgacatcttgactgtcaatgacagaatagtggccatggagaagctcagagatgaggaatgctccagagctgacactgatgatggatcagcctgttatttaacagacagagcaaggatactagataagatagtgtccagcaatgctgaagaggctaaggaagatttggatgttgatgacatcatgggcattaatttttagttaattaaaataacaacaggacaaataatggaggcctacttggtagagatgtaccatggtgtcccatatacagctgcagtacagctaaacttggttgaaaaacattcagccaacatatcactaactgtgtggataccgatgtttcaaacatctctaccaaagaactccgttatggacctgctacatgatgttacagtcatttgtacacagatatcaacagtgcatggtcccatgatcaaggtagatctgagctcttccaatgcaggtttagctaccatgccaaggcaattcttgataaatgctatcatagctttggatgactggggcaacatggattacgaagtgcctgttgcttttgataaaaagagcttctgtgtgacaattcttaagcctaaaaacatgctttacactgtacccagcattactcccactaatcgacctactcatgagctgatagctgtctgctctttccataacagggtaacattaaagtcattcaatatacctgtcttcatcagagcactgtctatcagacagcaggaccttgatagtgtggagcaggctataagctccgatgtggaccatgctataacaacagctagggtggctccctatgcagggcttacacttgtgatcaacatcacatccaccaaaggagcattcaaactgctaaaggcaggtagtcagattcttgcagaactgggtccctatctgacgcaggtgagcctacatgatgtgattatgaactggaaacatacaggcacttcctacatactcaagagctcctcaacaagtggatgaaaaagagaaagtcaccattgatcagctcaatccacaactacaaccccacgatttcacacagcacaacaaccaccgccaccaacatccacatgacaaccacacatacacacccacatacatatatacacatatcttagttaaataaaatcaggataaataatggatcctaacatgacctcacaccagatcaccctcgagatcaacatgaccagcagccgtattggcacatacactacaccagccccaacagctcttctccttgcatgtgccgtcatcaacacagtgtgtgcgctgataatggcctgcagcagtagaagcactgccacatcaggcattgtcagcagccaatgcacagttcatcccaatcaccctccaccaagttatggcgtcaatgtaactggtctgccgggtaacctatactcaaggaacactacataacattataaataacagaaattatccttcaataaaccccaggccagacagctttaccctgctagacgattcaatcagcccttgcagtatgtcgtctagttaacaaaaaaccggtaggataagtactatcctattggaaccaaacgagacctgtagagcagctcacacaagagaaccacaagctgacttcacctagtatgggaaggaacttagaagtgagtggcagcattaccaatttgaactttgagagaactcagcatcctgacacatttaggactgttgtaaaagtgaaccaaatgtgtaagcttattgcaggtgtgctcacaagtgctgctgtggcagtttgtgtgggggtcataatgtattctgttttcacatcaaaccacaaggccaactccacgcagaatgccacgacccggaacagcacatccacccctccccaaccaaccgccggtctgcccaccacagagcaagggaccatccccagattcaccaaaccccccaccaaaaccgccacccaccatgagatcacagagcccgtcaaaatggcaacaccttcagaggatccctaccaatgctccagcaatggttatttggaccgacctgatttacctgaaaatttcaaactcgtattggatgttatatgcaagcctccaggtcctgaacatcacaacaccagctgttatgagaaacgtgaaatcaacccaggaagtgtttgccctgatcttgtaacaatgaaggcaaacatgggcttaaacaatggtggtggggaggatgctgcaccttatatagaggttaccaccctttctacgtactccaacaaaagggcaatgtgtgtccacaatgggtgtgatcaaggcttctgtttcttcctttctggtttaagcactgatcaggagagagctgtgctagagcttggaggtcaacaggctatcatggagttgcattatgattcctactggaaacactattggagtaactctaattgtgttgttcccagaacaaactgcaacctgacagaccaaactgagattttgtttcctaggtttaacaacaagaatcagtctcagtgtaccacctgtgcagattcagctggcctagataacaaattttatctcacatgtgatgggcttttaagaaccctccctctagttggactacccagcctaagtcctcaggcttacaaagctgtacccacacaaactacaggcaccaccacggcaccaacatcagagacgaggcacccaacccctgcacccaggaggtccaaacctctcagtcggaagaagagagctttatgtggtgtagactcaagcagagaacccaaaccaacaatgccttactggtgtcctatgctccaattatttccaaggaggtctaattcttaagtgacctattcctgaattaacttcagaataagtaccaaccttatcagtagttaatgaaaactaagctttgatataataggacaaatatgattcctggcaggatctttctagtccttctggtgatcttcaacaccaagccaattcacccaaatacattaacagaaaaattctatgagtccacatgtagtgttgagactgcaggttataagagtgcccttagaacaggttggcatatgacagttatgtcaattaagttgtctcaaataaatattgagtcatgcaagagcagcaactcgttattggctcatgagcttgcaatctatagtagtgcagtggatgaattgagaacgttatcatccaatgccttgaagtccaaaaggaagaagaggttcctcggtttgattcttggtctcggagctgcagtcactgccggggtggctttagccaagacagtgcaacttgaaagtgagattgcattgattagagatgcagtgagaaatacaaatgaggctgttgttagcctaaccaacggcatgtcagtgttggctaaagtggtggatgatttgaaaaacttcatatctaaagaattactcccaaaaataaaccgagtctcttgtgatgtgcacgacatcactgccgtcattagattccaacagctcaacaaaagacttttggaagtatctcgtgaattttcatctaatgcaggattaacacacactgtttcatcttttatgttaacagaccgggaactcacctccattgtaggcggcatggctgtttcagcaggccaaaaagagataatgctatctagcaaagctataatgagaagaaatgggttagcaatattaagttcagtcaacgctgacacactggtttatgtaatacaactcccattatttggtgttatggacacagattgttgggtaataagaagttctatagactgtcataacatagcagacaagtatgcttgtttggctagagctgataatggctggtattgtcacaatgctggctcattatcatacttcccgtcgccaacggattgtgagatccacaatgggtatgctttctgtgacactctaaaaagtctaactgtacctgtaacatcacgagaatgcaactcaaacatgtataccactaactacgattgtaagatttccacaagtaaaacttatgtgagtacagcggtactgactacaatgggttgcttggtatcttgttatggtcataacagttgcacagtcatcaataatgacaaaggtataataaggactctgccagatggttgccactacatctccaacaaaggtgtggacagggttcaagtaggtaacactgtttactatcttagcaaagaagttggcaagtcaattgttgtcagaggggaaccattggtcttgaaatatgaccctttgagtttccctgacgataaatttgatgttgctataagagatgtggagcatagcatcaatcagacacgcacattcttgaaggcctctgatcagttattggacttaagtgaaaacagagagaataaaaatttaaacaagtcatatatactaacaactctgctcttcgttgtaatgcttattataataatggctgtcatagggttcattctgtataaggtattgaaaatgatcagagacaacaagttgaaatccaaaagtacacctggcctcacagttttatcatgacaattgtaccaaaccataattgagttagttaattaaaaacttaggataagtgacaatccagacccaacacctctttcaactctcaaggataaggtaggatgagtgtgagaccttgcaaatttgaggttcaagggttttgttccagagggaggaattgcaagtatagtcataaatattgggaatggcctttgaaaactcttatgctcaggcagaactacatgcttaataggatttataggttcctcgacaccaacacagatgcaatgtcagatgtcagcggatttgatgcaccacaaaggactgctgagtatgccttgggaaccataggtgtgctgaaaagttacctggaaaaaactaacaacatcactaaatcaatagcttgtggcagtttgatcactgtattgcagaacttggatgttggtctagtaatacaagcaagagatagcaacactgaggacaccaattacttgagaagttgcaacactatactgtcttatatagacaagatacacaagaagagacaaattattcacattctcaaaagactgccagtaggagtactatgcaatctgatccaatctgtcatctccatcgaggagaagataaattcttctatgaaaacagaatgataaggctgcctaaatactatccagccatactgcataagatgtatattattagagtaaatagaaacctcacttacgatgggtctggaccatccacaataatagatgcaggaaagtctgtggtgtggaatcgtgttgatgtgatagcttgtgtgaaagaggccttgtgctgcatagaattcagctggaataaccaagtgatcatagactttgattatagccaggccagatgatgtggactgtattcctttttttgtcagtaatcagttattaacccaaaattgttaattatgtagactttaagttaactaacttcatgttaattcaatagttatataaaaaaatattcgaattaggatcaatatggatcctattgatgaacaagaagttaatgtgtacttgccggatagctacttaaagggtgttatatcttttagtgaaactaatgctcttggcagctgtatcattggtagacctttcttgaaggatgactttactgccactacttcaatccgtaaccccctaattgaacataaaagaataagggacactaaattagtaaaaaatattgtttcaaaccctcaatataggttagtggagcctctccaaatgcagcatgagctcttgagtgtactatcgcccaatttcatattgcacactgccaacttaaggaaaattatacaaagaagtgttgacataacagataaaaagttgaaccccattttgcacattttgaatcttaattctcctaaccaagagggtaaggtgtcggaacggctaactaggctaattaagaaacatctctctcacatacctaattgggtaagcagctggtacaatatatgggtcaatcttaacaacttactgcaggagtaccgttcaaaggaagttatagaccataactgtgttctgactaggcaattgtctggaagtttcatacatgtggtcatgagtcaatatggagttgtgataattagcaaaaaaagtaaaagatatacaatgtgtacttataaccaattcctaacctggaaggaccttgccttgagcagatttaatgccaattatgtggtctggctaagtaatgtgttaaacacactcaacgaggggttgggattaaggtgtagattaaaaggtcatctgctcagtaagttgtacatttccactgacatctttttatcttcaacatctaatgaattttataatgtggtcaaggaatttgagggcttcatcatgtcactgatattgaaacaaactgaggaagccttatttagcacaaggttttataataacatgttgaacaacttaattgatgccattgatagggctcgactagagtatctggcccgctgtgccaattcagctgccaggattaatttacctagtacagatgttatgatagcatcattgggtgatatcttatctttgataaacgttttaggtgaatccaaccttaacaacttaagtgagttatattttatcttcaggatatttggtcaccctatggttgatgagaggaaggccatggatgcagtcagagataactgttgtgaaacaaagtttctgacggctaagaaccttgcatcgttaagaggagcatatgtttatagaattatcaaaggattcgtagcaaattataacaggtggccttacataaaaactagagtttgccttacaccaacatggattaactatcttgacaccaattcatgtccctcattattagagatgacagaagatgattttattgtgttagctggagtgcactttataagagaattccacatcccaaagctaactgatctggagattatattaaatgacaaggccatatctcctccaaaatcactcatttggtcatgctttccaaaaaactacatacctcaggttatacaagatgagtatgcccggaggtattgtagagctaaagcacctttgaagacaagacgtgtcttggagttctacttacaggacaaggatttcaagttggatcagctccatagagtagtagtgaaccaggactaccttaatgataaagaacatataatttctttaacaggaaaagaaagagagttgggtgttggtaggatgtttgccatgcaacctgggaagcagaggcaagtccaaattttagcagagaagctgttggctgataacatcctgcaattctttccggagacactgactagatacggtgatttggagctgcaaaagatactagagttaaaagctggactttcaaataaaaatgacagatctaaagactcctacaataattatataagtaggtgctcattaattactgatttaagtaaatttaaccaagcttttaggtacgagtcatcctgtgtgtgtagtgatcttttagatgagctacatgggactcaaagcttattctcttggctgcatttaacagtaccactgactactataatgtgtacatataggcatgcgccgccggacactggaaacaactataatgtagatgatattgctgagcagagtggactctaccgctaccacatgggcgggattgagggctggtgccagaagctctggacaacagaggccattgctttgctagatactgtagctgtgaagggccgtttccagctaacttcattaataaatggcgacaaccaaagtattgatatttcaaaaccaacaaggctggggaccaggactcaaagtgaagcagattatgatttggcaataaattctttaagattaatatcagcagcttataaaggcattggacataaattaaaagaaggtgagacctacttgtcacgtgacatgcagttcatgagtaaaacaatacaacatgaaggggtctactacccggcctccatcaagaaaatattaagagttggtccctggatcaacacaatattagatgatataaaaacttcaacagaaagtattggttctctaactcaagaactagaatataaaggtgaaagtttaatgagcagcctgctgctgaggaacttctggctctacagattatattcagtggatttaaaagatcattctttgtgtggaaagcagctctacagatccttaataaaagtgttaaaacatttgaagaggtgcttcaacctggagaaccttggggaatgtttggaattatttttaaatgtgcccatgcagtttggaggtgctgacccaaatgtcatctacaggagcttctacagaagaactccagattttctaacagaaagtataactcatctcatcctcattttaaaacattttagaagagatttggaattcaacaaagataatgtctccaaagctgttctttctttgctagagttcaccaagaatgattctgcagaatttgtaactttgatgagagatcctcaagcaattggtagtgagaggcaggccaagatcacttcagacatcaacagaacagctgtaacttcagtgttatcaaatgctccaaatgaaatatttagaacttcagctcttcattacagcagcacagaaaatgaattaaatggaatagcaagtggagtttctcctgtttatcctcatggtcttcgagttttatatgaaagtttacctttttataaagcagagaagattgtcaacatggtttctgggaccaagtccatcaccaacatactggagaagacatcagccatctcctacacagatataattcgagccaccaacatgatggtggagaacctcactttgctaacaagaataatgaaaccaggtgctgacacatctttggatcctgacacaatagtaataacaatattatcaaaaataataagagataaatcctgggatgttggtgatataattggtgtcacttccccatctcctgtctcctgcttcaaggtggtctacacatcaactctacaaaataattcagtagtaatagaaagatacacaacagacacctacacaagaggtaagagaggccccaccaagccctgggtgggcagcagcacacaggagaagaagtccatgcctgtctacaacagacaagttttaacaagaggacaaagagatcaaatagaaaatatagcaaagctggagtgggtgttttcttcagtagcaaatattgattctttgctaaatgagctcagcaccatgactttgggtctttctctaaggaaatgtagacaactttttccaacatatttaagtttaaacttcctgcacaggctttctgtcagcagcaggcccagagaatatccttcttctcttcctgcctacaggacaacaaattttcattttgatactggaccaataaataaagtgttaacagaaagatttggagatgaagatataaatttggtatttcaaaatgcaatatcatatggtctttccaccatgtctttggtggagcagtttactggtgtctgtccaaataaagttttgctggtgcccaagctacaagaaatacaactaatgaaagttccaatatttcaaggtggcttcaacctacaaagtataattccaataataaggcagcagcacatgttcctgcccaaccacatcactccagcccagtatattgaattatttctttcttcaaaacaatttcattcaagaataaatttaaaacacaacaacagatttaaacttgttttacaaaaagattattttaatggggagaacatgatagaaactttgtccacctgtttggcaggccactggatcatcattttgatgctaatgaaggagagtcaggggatatttgacaaggagtggtatgatggttttgtaacagaccacatgttcctggacctgcagctcttcctctcctccttcaagacatttctaactgtcttcaactttgcttatttaaaagttggttcaaatatagaagaaataacaggaaatcaagccaacctgctggagctgctggacctgggctactggaagaacatgtataaagtattttcagagaccaaggtgcggctggctttgctaaaacaagatttatcatttaattctgtgaagaacagcagcagcttccggcactggtttataaattctctacaagaagtacaatgtacttctgtgccttgggtggtaaatgtaacaagaaatccaactcatttaaaaggtgttctacagtacatgaagatgatagaaagtggcatgattcaaggttattcagcaaatatttcttcagttttaagtatcccatataattatccagacatggcgcacatgatgacaaaaataataagaaatcgaggccacatgtcctatgattatccaaagatgaagaaaagtttaactttctccatgacagacatgagtgacagctacatgctcaacctcttccccaaagtagaatgttcttacatgagtggttatttggataaactagatgatactctacaacttctaaagaaacctcctgttggaagaaaagttccttctgtggctttgccctggcaccactgcaacagatacaactttgtcttcagcagcacaggctgcaaagtttctgtcattgacatgcttccaaaacatttccgaagaagtaatttaaaagtaatatgttttattggagaaggggcgggcaacctcatgctaagagctgttttggaagttggtggaaatataaaattaatatatagatccttaaaagatcctgatgatcatcatgttcctgtagaatttctaagattaaaaccttgttatccttatattgatactggtggcagtttatctttggcttcaacagatgccaccaacaaggcccactgggattatttacatcttcactggacagatcctttaaatttaatagtatgtgatgcagaaataagtggtgtgaagcactggctaaaaattcttcacaggtggtatgagcacatgacttcctgcaagcactgtttaaaatcagaacatgataaatatttaataataaaatatcatgctcaagatgatttaatagatcttcctcatggtgtcaggctactaaaatgtaacatctgcctgggctccaaactaagtggcagtgagagctacctgctcattggtcttggtctttcaaataaacttcctgtctacagtgaagttcttcattcaaaacttcttttggcagaatgtcatcagtttcatcatccaaaatatttggatgtttctggaataaatacaaatataaaatccttaataccaatgttggattatccaataacttacaacaagatcaccactttgctagaaagtgtgcgggagctttcttcaaataaaaacaagaacaccatgtggattggaagaaatcctgtctaccataataaatggctaaagaggaaatatttcaacattttaaaatggctaaaatactgtatagaacttcctgccttcaggatggattataattcatttgagagaatagaaatgctttatccaaatttaagagatttggtagattctgtttctacttcagagctgaagaaagtaataaaagtaacaggcatcctcttcaggagcaacaccatgtgaattaatatgccaatgctaacatgtcatccccactactttttttgttcaatcactctcagtctagacatgtgagaagatcccaaacccaactgcacccctcccactcgaaatcagttgtagcctcagcagctccatctgccatgatctctgaccagcagcaaatgtattattattttaatttgtctatagttaacaaaaaattgatatctcacaggttgtaaacatagttcttttataattattgttagttaaactattgtgtttgacttcctttgggtatttttttcccgt

SEQ ID NO: 16 - DNA, 21750 bp, synthetic construct
  source 1..21750: mol_type = other DNA
acgcgaaaaaatgcataacaaaactatcaacctgaaaaaagttaggacaagtgaagattgctagtcccaaagaccagaatcatgggctgtaatgtgatgatggagcttgattatggtggacgagctgcatggctggcattccacataaccaactttgataggtcagatttggaaactatcctaagaggtgctagggtgtgcaatacatggcaagatcagagactctccgtgtaccttgtgggaagggattgcaatttgttaagaccatttgtgcaagctgccaaatttatccataatactaggagaggccaaacattaacacattggttcacaaaaaatatcgtgtttagttctacagggcaagagacagagcctcccattgaccccacatgtgagctgttggtagagctgatcagtggttaagatgacagcacattatgtagttaattaaaacaaagggtaggacaagtcctaatgtccacagctatgaacaagttcactcagaccatctctaaacctgccactatcttgaatatttcagacagtgaagagtcgggcgatgaggcaggggtgggcaaggtgtcccgtaccacacagagctcagagaggtggcttgatttgctcattgaaaagttccagccgagcctacaaaacatcactagatacatcaactggaacttcatcaggatctgcaatgataggcttaaaaaagaaaaaatggggtacattgaggccaagcaatatgtggaagacatggcttggatggtgatagcatctgaggcagacagcattgagtggaagtgcataaggaggcaggagaaagtgactggggtgaaatacccaaagttcttctttgtacaacacaaagaggactggattgagtgcacaggatgcattccgtacccaggccatgacttgatctatgatgaggatgatgatgactgagctgactcagatcactccaaccagcagagagatccaccacctatagcaagtgatgtagtatttagtctatgattagttatagaaaaacattaggataaatacacatcctaggccgggccaaaatgtctctagacagattgaagctcaatgatgtctcaaacaaggatagcctgctgtccaactgcaaatacagtgttaccagatccacaggcgatgtaaccagtgtgtctggtcatgctatgcagaaagcccttgcaaggacactcggcatgttcttacttactgccttcaaccgttgcgaagaagtggcagaaatagggctccaatatgccatgtccttgctaggcagagatgatagcatcaagatattaagagaagccggctacaatgtaaaatgtgtggacacacagctcaaggactttacaatcaaattacaaggaaaggaatacaaaatacaagtcctagatatagtgggaatagatgcagccaatttagctgatctagagatacaagccagaggagtggtagcaaaagaactcaaaacaggagccaggctacctgacaatcggaggcatgatgcaccagattgtggtgtgatagttctctgtattgcagcattagttgtttccaaattagctgcaggggacaggggaggacttgatgctgtggaaagaagggctttaaatgtgctgaaagccgagaaagccaggtaccccaacatggaggtcaagcagatagctgaaagtttttatgatctgtttgaaaggaagccttattacattgatgtcttcatcacttttggcctggcccagtctagtgtcaagggaggcagcaaagttgaggggctgttttcaggtctcttcatgaatgcatacggggcaggacaagttatgctgaggtggggtttactggcaaaatctgtcaagaacatcatgctaggccatgctagtgtacaagctgagatggaacaggtggttgaggtttacgaatatgctcagaagcaaggaggggaggcaggattctatcacatcagaaataatccaaaagcttcacttctctctttgaccaattgtcctaatttcaccagtgttgtgcttggcaatgctgcaggtttaggcatcatagggtcatataagggtgctcctaggaatagagaactctttgatgctgccaaagattatgcagaaagattaaaggacaacaatgtaattaactacagtgcattaaacttgactgcagaagaaagagagctgatcagccagcagctgaacattgttgatgacactcctgatgatgatatttaattaaaactggaaaatgtaggataaatagccgccaccatgtttgtttttcttgttttattgccactagtctctagtcagtgtgttaatcttacaaccagaactcaattaccccctgcatacactaattctttcacacgtggtgtttattaccctgacaaagttttcagatcctcagttttacattcaactcaggacttgttcttacctttcttttccaatgttacttggttccatgctatacatgtctctgggaccaatggtactaagaggtttgataaccctgtcctaccatttaatgatggtgtttattttgcttccactgagaagtctaacataataagaggctggatttttggtactactttagattcgaagacccagtccctacttattgttaataacgctactaatgttgttattaaagtctgtgaatttcaattttgtaatgatccatttttgggtgtttattaccacaaaaacaacaaaagttggatggaaagtgagttcagagtttattctagtgcgaataattgcacttttgaatatgtctctcagccttttcttatggaccttgaaggaaaacagggtaatttcaaaaatcttagggaatttgtgtttaagaatattgatggttattttaaaatatattctaagcacacgcctattaatttagtgcgtgatctccctcagggtttttcggctttagaaccattggtagatttgccaataggtattaacatcactaggtttcaaactttacttgctttacatagaagttatttgactcctggtgattcttcttcaggttggacagctggtgctgcagcttattatgtgggttatcttcaacctaggacttttctattaaaatataatgaaaatggaaccattacagatgctgtagactgtgcacttgaccctctctcagaaacaaagtgtacgttgaaatccttcactgtagaaaaaggaatctatcaaacttctaactttagagtccaaccaacagaatctattgttagatttcctaatattacaaacttgtgcccttttggtgaagtttttaacgccaccagatttgcatctgtttatgcttggaacaggaagagaatcagcaactgtgttgctgattattctgtcctatataattccgcatcattttccacttttaagtgttatggagtgtctcctactaaattaaatgatctctgctttactaatgtctatgcagattcatttgtaattagaggtgatgaagtcagacaaatcgctccagggcaaactggaaagattgctgattataattataaattaccagatgattttacaggctgcgttatagcttggaattctaacaatcttgattctaaggttggtggtaattataattacctgtatagattgtttaggaagtctaatctcaaaccttttgagagagatatttcaactgaaatctatcaggccggtagcacaccttgtaatggtgttgaaggttttaattgttactttcctttacaatcatatggtttccaacccactaatggtgttggttaccaaccatacagagtagtagtactttcttttgaacttctacatgcaccagcaactgtttgtggacctaaaaagtctactaatttggttaaaaacaaatgtgtcaatttcaacttcaatggtttaacaggcacaggtgttcttactgagtctaacaaaaagtttctgcctttccaacaatttggcagagacattgctgacactactgatgctgtccgtgatccacagacacttgagattcttgacattacaccatgttcttttggtggtgtcagtgttataacaccaggaacaaatacttctaaccaggttgctgttctttatcaggatgttaactgcacagaagtccctgttgctattcatgcagatcaacttactcctacttggcgtgtttattctacaggttctaatgtttttcaaacacgtgcaggctgtttaataggggctgaacatgtcaacaactcatatgagtgtgacatacccattggtgcaggtatatgcgctagttatcagactcagactaattctcctcggcgggcacgtagtgtagctagtcaatccatcattgcctacactatgtcacttggtgcagaaaattcagttgcttactctaataactctattgccatacccacaaattttactattagtgttaccacagaaattctaccagtgtctatgaccaagacatcagtagattgtacaatgtacatttgtggtgattcaactgaatgcagcaatcttttgttgcaatatggcagtttttgtacacaattaaaccgtgctttaactggaatagctgttgaacaagacaaaaacacccaagaagtttttgcacaagtcaaacaaatttacaaaacaccaccaattaaagattttggtggttttaatttttcacaaatattaccagatccatcaaaaccaagcaagaggtcatttattgaagatctacttttcaacaaagtgacacttgcagatgctggcttcatcaaacaatatggtgattgccttggtgatattgctgctagagacctcatttgtgcacaaaagtttaacggccttactgttttgccacctttgctcacagatgaaatgattgctcaatacacttctgcactgttagcgggtacaatcacttctggttggacctttggtgcaggtgctgcattacaaataccatttgctatgcaaatggcttataggtttaatggtattggagttacacagaatgttctctatgagaaccaaaaattgattgccaaccaatttaatagtgctattggcaaaattcaagactcactttcttccacagcaagtgcacttggaaaacttcaagatgtggtcaaccaaaatgcacaagctttaaacacgcttgttaaacaacttagctccaattttggtgcaatttcaagtgttttaaatgatatcctttcacgtcttgacaaagttgaggctgaagtgcaaattgataggttgatcacaggcagacttcaaagtttgcagacatatgtgactcaacaattaattagagctgcagaaatcagagcttctgctaatcttgctgctactaaaatgtcagagtgtgtacttggacaatcaaaaagagttgatttttgtggaaagggctatcatcttatgtccttccctcagtcagcacctcatggtgtagtcttcttgcatgtgacttatgtccctgcacaagaaaagaacttcacaactgctcctgccatttgtcatgatggaaaagcacactttcctcgtgaaggtgtctttgtttcaaatggcacacactggtttgtaacacaaaggaatttttatgaaccacaaatcattactacagacaacacatttgtgtctggtaactgtgatgttgtaataggaattgtcaacaacacagtttatgatcctttgcaacctgaattagactcattcaaggaggagttggataagtattttaagaatcatacatcaccagatgttgatttaggtgacatctctggcattaatgcttcagttgtaaacattcaaaaagaaattgaccgcctcaatgaggttgccaagaatttaaatgaatctctcatcgatctccaagaacttggaaagtatgagcagtacatcaagtggccatggtacatttggctaggttttatagctggcttgattgccatagtaatggtgacaattatgctttgctgtatgaccagttgctgtagttgtctcaagggctgttgttcttgtggatcctgctgcaaatttgatgaagacgactctgagccagtgctcaaaggagtcaaattacattacacataatgatatttaattaaaactggaaaatgtaggataaatatggagaaattcgcccccgaatttgttggcgaggatgctaacaagaaggcagaggagtttctcaaacatagatccttcccttcggaaaaaccactagctggtataccgaacactgccactcatgtcaccaaatataacatgccccctatattgcgtagctcattcaaactcccttccccgagagttgctgcaaatcttactgaaccctctgctccccctaccactccaccacccacacctccccagaacaaggaagagcagcccaaagagtctgatgttgacattgagactatgcatgtctgtaaggttcctgacaatccggaacacagcaagaagccatgctgctcagatgataccgatactaagaaaactaggaagccgatggtcacctttgtggaacccgaggagaaatttgtcggattgggagctagcttgtacagggagaccatgcagacctttgctgctgatggttatgatgaagaaagcaacctatcgtttgaggagactaaccaagagccgggttcttcatctgtagaacaaagactagatagaatagaggagaaattgtcctacataataggccttttaaacaccataatggtagcgactgctggacctaccactgctagagatgagattagagatgcccttataggcactagagaagaacttattgagatgatcaagtctgacatcttgactgtcaatgacagaatagtggccatggagaagctcagagatgaggaatgctccagagctgacactgatgatggatcagcctgttatttaacagacagagcaaggatactagataagatagtgtccagcaatgctgaagaggctaaggaagatttggatgttgatgacatcatgggcattaatttttagttaattaaaataacaacaggacaaataatggaggcctacttggtagagatgtaccatggtgtcccatatacagctgcagtacagctaaacttggttgaaaaacattcagccaacatatcactaactgtgtggataccgatgtttcaaacatctctaccaaagaactccgttatggacctgctacatgatgttacagtcatttgtacacagatatcaacagtgcatggtcccatgatcaaggtagatctgagctcttccaatgcaggtttagctaccatgccaaggcaattcttgataaatgctatcatagctttggatgactggggcaacatggattacgaagtgcctgttgcttttgataaaaagagcttctgtgtgacaattcttaagcctaaaaacatgctttacactgtacccagcattactcccactaatcgacctactcatgagctgatagctgtctgctctttccataacagggtaacattaaagtcattcaatatacctgtcttcatcagagcactgtctatcagacagcaggaccttgatagtgtggagcaggctataagctccgatgtggaccatgctataacaacagctagggtggctccctatgcagggcttacacttgtgatcaacatcacatccaccaaaggagcattcaaactgctaaaggcaggtagtcagattcttgcagaactgggtccctatctgacgcaggtgagcctacatgatgtgattatgaactggaaacatacaggcacttcctacatactcaagagctcctcaacaagtggatgaaaaagagaaagtcaccattgatcagctcaatccacaactacaaccccacgatttcacacagcacaacaaccaccgccaccaacatccacatgacaaccacacatacacacccacatacatatatacacatatcttagttaaataaaatcaggataaataatggatcctaacatgacctcacaccagatcaccctcgagatcaacatgaccagcagccgtattggcacatacactacaccagccccaacagctcttctccttgcatgtgccgtcatcaacacagtgtgtgcgctgataatggcctgcagcagtagaagcactgccacatcaggcattgtcagcagccaatgcacagttcatcccaatcaccctccaccaagttatggcgtcaatgtaactggtctgccgggtaacctatactcaaggaacactacataacattataaataacagaaattatccttcaataaaccccaggccagacagctttaccctgctagacgattcaatcagcccttgcagtatgtcgtctagttaacaaaaaaccggtaggataagtactatcctattggaaccaaacgagacctgtagagcagctcacacaagagaaccacaagctgacttcacctagtatgggaaggaacttagaagtgagtggcagcattaccaatttgaactttgagagaactcagcatcctgacacatttaggactgttgtaaaagtgaaccaaatgtgtaagcttattgcaggtgtgctcacaagtgctgctgtggcagtttgtgtgggggtcataatgtattctgttttcacatcaaaccacaaggccaactccacgcagaatgccacgacccggaacagcacatccacccctccccaaccaaccgccggtctgcccaccacagagcaagggaccatccccagattcaccaaaccccccaccaaaaccgccacccaccatgagatcacagagcccgtcaaaatggcaacaccttcagaggatccctaccaatgctccagcaatggttatttggaccgacctgatttacctgaaaatttcaaactcgtattggatgttatatgcaagcctccaggtcctgaacatcacaacaccagctgttatgagaaacgtgaaatcaacccaggaagtgtttgccctgatcttgtaacaatgaaggcaaacatgggcttaaacaatggtggtggggaggatgctgcaccttatatagaggttaccaccctttctacgtactccaacaaaagggcaatgtgtgtccacaatgggtgtgatcaaggcttctgtttcttcctttctggtttaagcactgatcaggagagagctgtgctagagcttggaggtcaacaggctatcatggagttgcattatgattcctactggaaacactattggagtaactctaattgtgttgttcccagaacaaactgcaacctgacagaccaaactgagattttgtttcctaggtttaacaacaagaatcagtctcagtgtaccacctgtgcagattcagctggcctagataacaaattttatctcacatgtgatgggcttttaagaaccctccctctagttggactacccagcctaagtcctcaggcttacaaagctgtacccacacaaactacaggcaccaccacggcaccaacatcagagacgaggcacccaacccctgcacccaggaggtccaaacctctcagtcggaagaagagagctttatgtggtgtagactcaagcagagaacccaaaccaacaatgccttactggtgtcctatgctccaattatttccaaggaggtctaattcttaagtgacctattcctgaattaacttcagaataagtaccaaccttatcagtagttaatgaaaactaagctttgatataataggacaaatatgattcctggcaggatctttctagtccttctggtgatcttcaacaccaagccaattcacccaaatacattaacagaaaaattctatgagtccacatgtagtgttgagactgcaggttataagagtgcccttagaacaggttggcatatgacagttatgtcaattaagttgtctcaaataaatattgagtcatgcaagagcagcaactcgttattggctcatgagcttgcaatctatagtagtgcagtggatgaattgagaacgttatcatccaatgccttgaagtccaaaaggaagaagaggttcctcggtttgattcttggtctcggagctgcagtcactgccggggtggctttagccaagacagtgcaacttgaaagtgagattgcattgattagagatgcagtgagaaatacaaatgaggctgttgttagcctaaccaacggcatgtcagtgttggctaaagtggtggatgatttgaaaaacttcatatctaaagaattactcccaaaaataaaccgagtctcttgtgatgtgcacgacatcactgccgtcattagattccaacagctcaacaaaagacttttggaagtatctcgtgaattttcatctaatgcaggattaacacacactgtttcatcttttatgttaacagaccgggaactcacctccattgtaggcggcatggctgtttcagcaggccaaaaagagataatgctatctagcaaagctataatgagaagaaatgggttagcaatattaagttcagtcaacgctgacacactggtttatgtaatacaactcccattatttggtgttatggacacagattgttgggtaataagaagttctatagactgtcataacatagcagacaagtatgcttgtttggctagagctgataatggctggtattgtcacaatgctggctcattatcatacttcccgtcgccaacggattgtgagatccacaatgggtatgctttctgtgacactctaaaaagtctaactgtacctgtaacatcacgagaatgcaactcaaacatgtataccactaactacgattgtaagatttccacaagtaaaacttatgtgagtacagcggtactgactacaatgggttgcttggtatcttgttatggtcataacagttgcacagtcatcaataatgacaaaggtataataaggactctgccagatggttgccactacatctccaacaaaggtgtggacagggttcaagtaggtaacactgtttactatcttagcaaagaagttggcaagtcaattgttgtcagaggggaaccattggtcttgaaatatgaccctttgagtttccctgacgataaatttgatgttgctataagagatgtggagcatagcatcaatcagacacgcacattcttgaaggcctctgatcagttattggacttaagtgaaaacagagagaataaaaatttaaacaagtcatatatactaacaactctgctcttcgttgtaatgcttattataataatggctgtcatagggttcattctgtataaggtattgaaaatgatcagagacaacaagttgaaatccaaaagtacacctggcctcacagttttatcatgacaattgtaccaaaccataattgagttagttaattaaaaacttaggataagtgacaatccagacccaacacctctttcaactctcaaggataaggtaggatgagtgtgagaccttgcaaatttgaggttcaagggttttgttccagagggaggaattgcaagtatagtcataaatattgggaatggcctttgaaaactcttatgctcaggcagaactacatgcttaataggatttataggttcctcgacaccaacacagatgcaatgtcagatgtcagcggatttgatgcaccacaaaggactgctgagtatgccttgggaaccataggtgtgctgaaaagttacctggaaaaaactaacaacatcactaaatcaatagcttgtggcagtttgatcactgtattgcagaacttggatgttggtctagtaatacaagcaagagatagcaacactgaggacaccaattacttgagaagttgcaacactatactgtcttatatagacaagatacacaagaagagacaaattattcacattctcaaaagactgccagtaggagtactatgcaatctgatccaatctgtcatctccatcgaggagaagataaattcttctatgaaaacagaatgataaggctgcctaaatactatccagccatactgcataagatgtatattattagagtaaatagaaacctcacttacgatgggtctggaccatccacaataatagatgcaggaaagtctgtggtgtggaatcgtgttgatgtgatagcttgtgtgaaagaggccttgtgctgcatagaattcagctggaataaccaagtgatcatagactttgattatagccaggccagatgatgtggactgtattcctttttttgtcagtaatcagttattaacccaaaattgttaattatgtagactttaagttaactaacttcatgttaattcaatagttatataaaaaaatattcgaattaggatcaatatggatcctattgatgaacaagaagttaatgtgtacttgccggatagctacttaaagggtgttatatcttttagtgaaactaatgctcttggcagctgtatcattggtagacctttcttgaaggatgactttactgccactacttcaatccgtaaccccctaattgaacataaaagaataagggacactaaattagtaaaaaatattgtttcaaaccctcaatataggttagtggagcctctccaaatgcagcatgagctcttgagtgtactatcgcccaatttcatattgcacactgccaacttaaggaaaattatacaaagaagtgttgacataacagataaaaagttgaaccccattttgcacattttgaatcttaattctcctaaccaagagggtaaggtgtcggaacggctaactaggctaattaagaaacatctctctcacatacctaattgggtaagcagctggtacaatatatgggtcaatcttaacaacttactgcaggagtaccgttcaaaggaagttatagaccataactgtgttctgactaggcaattgtctggaagtttcatacatgtggtcatgagtcaatatggagttgtgataattagcaaaaaaagtaaaagatatacaatgtgtacttataaccaattcctaacctggaaggaccttgccttgagcagatttaatgccaattatgtggtctggctaagtaatgtgttaaacacactcaacgaggggttgggattaaggtgtagattaaaaggtcatctgctcagtaagttgtacatttccactgacatctttttatcttcaacatctaatgaattttataatgtggtcaaggaatttgagggcttcatcatgtcactgatattgaaacaaactgaggaagccttatttagcacaaggttttataataacatgttgaacaacttaattgatgccattgatagggctcgactagagtatctggcccgctgtgccaattcagctgccaggattaatttacctagtacagatgttatgatagcatcattgggtgatatcttatctttgataaacgttttaggtgaatccaaccttaacaacttaagtgagttatattttatcttcaggatatttggtcaccctatggttgatgagaggaaggccatggatgcagtcagagataactgttgtgaaacaaagtttctgacggctaagaaccttgcatcgttaagaggagcatatgtttatagaattatcaaaggattcgtagcaaattataacaggtggccttacataaaaactagagtttgccttacaccaacatggattaactatcttgacaccaattcatgtccctcattattagagatgacagaagatgattttattgtgttagctggagtgcactttataagagaattccacatcccaaagctaactgatctggagattatattaaatgacaaggccatatctcctccaaaatcactcatttggtcatgctttccaaaaaactacatacctcaggttatacaagatgagtatgcccggaggtattgtagagctaaagcacctttgaagacaagacgtgtcttggagttctacttacaggacaaggatttcaagttggatcagctccatagagtagtagtgaaccaggactaccttaatgataaagaacatataatttctttaacaggaaaagaaagagagttgggtgttggtaggatgtttgccatgcaacctgggaagcagaggcaagtccaaattttagcagagaagctgttggctgataacatcctgcaattctttccggagacactgactagatacggtgatttggagctgcaaaagatactagagttaaaagctggactttcaaataaaaatgacagatctaaagactcctacaataattatataagtaggtgctcattaattactgatttaagtaaatttaaccaagcttttaggtacgagtcatcctgtgtgtgtagtgatcttttagatgagctacatgggactcaaagcttattctcttggctgcatttaacagtaccactgactactataatgtgtacatataggcatgcgccgccggacactggaaacaactataatgtagatgatattgctgagcagagtggactctaccgctaccacatgggcgggattgagggctggtgccagaagctctggacaacagaggccattgctttgctagatactgtagctgtgaagggccgtttccagctaacttcattaataaatggcgacaaccaaagtattgatatttcaaaaccaacaaggctggggaccaggactcaaagtgaagcagattatgatttggcaataaattctttaagattaatatcagcagcttataaaggcattggacataaattaaaagaaggtgagacctacttgtcacgtgacatgcagttcatgagtaaaacaatacaacatgaaggggtctactacccggcctccatcaagaaaatattaagagttggtccctggatcaacacaatattagatgatataaaaacttcaacagaaagtattggttctctaactcaagaactagaatataaaggtgaaagtttaatgagcagcctgctgctgaggaacttctggctctacagattatattcagtggatttaaaagatcattctttgtgtggaaagcagctctacagatccttaataaaagtgttaaaacatttgaagaggtgcttcaacctggagaaccttggggaatgtttggaattatttttaaatgtgcccatgcagtttggaggtgctgacccaaatgtcatctacaggagcttctacagaagaactccagattttctaacagaaagtataactcatctcatcctcattttaaaacattttagaagagatttggaattcaacaaagataatgtctccaaagctgttctttctttgctagagttcaccaagaatgattctgcagaatttgtaactttgatgagagatcctcaagcaattggtagtgagaggcaggccaagatcacttcagacatcaacagaacagctgtaacttcagtgttatcaaatgctccaaatgaaatatttagaacttcagctcttcattacagcagcacagaaaatgaattaaatggaatagcaagtggagtttctcctgtttatcctcatggtcttcgagttttatatgaaagtttacctttttataaagcagagaagattgtcaacatggtttctgggaccaagtccatcaccaacatactggagaagacatcagccatctcctacacagatataattcgagccaccaacatgatggtggagaacctcactttgctaacaagaataatgaaaccaggtgctgacacatctttggatcctgacacaatagtaataacaatattatcaaaaataataagagataaatcctgggatgttggtgatataattggtgtcacttccccatctcctgtctcctgcttcaaggtggtctacacatcaactctacaaaataattcagtagtaatagaaagatacacaacagacacctacacaagaggtaagagaggccccaccaagccctgggtgggcagcagcacacaggagaagaagtccatgcctgtctacaacagacaagttttaacaagaggacaaagagatcaaatagaaaatatagcaaagctggagtgggtgttttcttcagtagcaaatattgattctttgctaaatgagctcagcaccatgactttgggtctttctctaaggaaatgtagacaactttttccaacatatttaagtttaaacttcctgcacaggctttctgtcagcagcaggcccagagaatatccttcttctcttcctgcctacaggacaacaaattttcattttgatactggaccaataaataaagtgttaacagaaagatttggagatgaagatataaatttggtatttcaaaatgcaatatcatatggtctttccaccatgtctttggtggagcagtttactggtgtctgtccaaataaagttttgctggtgcccaagctacaagaaatacaactaatgaaagttccaatatttcaaggtggcttcaacctacaaagtataattccaataataaggcagcagcacatgttcctgcccaaccacatcactccagcccagtatattgaattatttctttcttcaaaacaatttcattcaagaataaatttaaaacacaacaacagatttaaacttgttttacaaaaagattattttaatggggagaacatgatagaaactttgtccacctgtttggcaggccactggatcatcattttgatgctaatgaaggagagtcaggggatatttgacaaggagtggtatgatggttttgtaacagaccacatgttcctggacctgcagctcttcctctcctccttcaagacatttctaactgtcttcaactttgcttatttaaaagttggttcaaatatagaagaaataacaggaaatcaagccaacctgctggagctgctggacctgggctactggaagaacatgtataaagtattttcagagaccaaggtgcggctggctttgctaaaacaagatttatcatttaattctgtgaagaacagcagcagcttccggcactggtttataaattctctacaagaagtacaatgtacttctgtgccttgggtggtaaatgtaacaagaaatccaactcatttaaaaggtgttctacagtacatgaagatgatagaaagtggcatgattcaaggttattcagcaaatatttcttcagttttaagtatcccatataattatccagacatggcgcacatgatgacaaaaataataagaaatcgaggccacatgtcctatgattatccaaagatgaagaaaagtttaactttctccatgacagacatgagtgacagctacatgctcaacctcttccccaaagtagaatgttcttacatgagtggttatttggataaactagatgatactctacaacttctaaagaaacctcctgttggaagaaaagttccttctgtggctttgccctggcaccactgcaacagatacaactttgtcttcagcagcacaggctgcaaagtttctgtcattgacatgcttccaaaacatttccgaagaagtaatttaaaagtaatatgttttattggagaaggggcgggcaacctcatgctaagagctgttttggaagttggtggaaatataaaattaatatatagatccttaaaagatcctgatgatcatcatgttcctgtagaatttctaagattaaaaccttgttatccttatattgatactggtggcagtttatctttggcttcaacagatgccaccaacaaggcccactgggattatttacatcttcactggacagatcctttaaatttaatagtatgtgatgcagaaataagtggtgtgaagcactggctaaaaattcttcacaggtggtatgagcacatgacttcctgcaagcactgtttaaaatcagaacatgataaatatttaataataaaatatcatgctcaagatgatttaatagatcttcctcatggtgtcaggctactaaaatgtaacatctgcctgggctccaaactaagtggcagtgagagctacctgctcattggtcttggtctttcaaataaacttcctgtctacagtgaagttcttcattcaaaacttcttttggcagaatgtcatcagtttcatcatccaaaatatttggatgtttctggaataaatacaaatataaaatccttaataccaatgttggattatccaataacttacaacaagatcaccactttgctagaaagtgtgcgggagctttcttcaaataaaaacaagaacaccatgtggattggaagaaatcctgtctaccataataaatggctaaagaggaaatatttcaacattttaaaatggctaaaatactgtatagaacttcctgccttcaggatggattataattcatttgagagaatagaaatgctttatccaaatttaagagatttggtagattctgtttctacttcagagctgaagaaagtaataaaagtaacaggcatcctcttcaggagcaacaccatgtgaattaatatgccaatgctaacatgtcatccccactactttttttgttcaatcactctcagtctagacatgtgagaagatcccaaacccaactgcacccctcccactcgaaatcagttgtagcctcagcagctccatctgccatgatctctgaccagcagcaaatgtattattattttaatttgtctatagttaacaaaaaattgatatctcacaggttgtaaacatagttcttttataattattgttagttaaactattgtgtttgacttcctttgggtatttttttcccgtgggtcggcatggcatctccacctcctcgcggtccgacctgggcatccgaaggaggacgcacgtccactcggatggctaagggagagcctgcagtagcataaccccttggggcctctaaacgggtcttgaggggttttttgctgaaaggaggaactatatacgcgtcgacgggcccgcgctcactggccgtcgttttacaacgtcgtgactgggaaaaccctggcgttacccaacttaatcgccttgcagcacatccccctttcgccagctggcgtaatagcgaagaggcccgcaccgatcgcccttcccaacagttgcgcagcctgaatggcgaatgggacgcgccctgtagcggcgcattaagcgcggcgggtgtggtggttacgcgcagcgtgaccgctacacttgccagcgccctagcgcccgctcctttcgctttcttcccttcctttctcgccacgttcgccggctttccccgtcaagctctaaatcgggggctccctttagggttccgatttagtgctttacggcacctcgaccccaaaaaacttgattagggtgatggttcacgtagtgggccatcgccctgatagacggtttttcgccctttgacgttggagtccacgttctttaatagtggactcttgttccaaactggaacaacactcaaccctatctcggtctattcttttgatttataagggattttgccgatttcggcctattggttaaaaaatgagctgatttaacaaaaatttaacgcgaattttaacaaaatattaacgcttacaatttaggtggcacttttcggggaaatgtgcgcggaacccctatttgtttatttttctaaatacattcaaatatgtatccgctcatgagacaataaccctgataaatgcttcaataatattgaaaaaggaagagtatgagtattcaacatttccgtgtcgcccttattcccttttttgcggcattttgccttcctgtttttgctcacccagaaacgctggtgaaagtaaaagatgctgaagatcagttgggtgcacgagtgggttacatcgaactggatctcaacagcggtaagatccttgagagttttcgccccgaagaacgttttccaatgatgagcacttttaaagttctgctatgtggcgcggtattatcccgtattgacgccgggcaagagcaactcggtcgccgcatacactattctcagaatgacttggttgagtactcaccagtcacagaaaagcatcttacggatggcatgacagtaagagaattatgcagtgctgccataaccatgagtgataacactgcggccaacttacttctgacaacgatcggaggaccgaaggagctaaccgcttttttgcacaacatgggggatcatgtaactcgccttgatcgttgggaaccggagctgaatgaagccataccaaacgacgagcgtgacaccacgatgcctgtagcaatggcaacaacgttgcgcaaactattaactggcgaactacttactctagcttcccggcaacaattaatagactggatggaggcggataaagttgcaggaccacttctgcgctcggcccttccggctggctggtttattgctgataaatctggagccggtgagcgtgggtctcgcggtatcattgcagcactggggccagatggtaagccctcccgtatcgtagttatctacacgacggggagtcaggcaactatggatgaacgaaatagacagatcgctgagataggtgcctcactgattaagcattggtaactgtcagaccaagtttactcatatatactttagattgatttaaaacttcatttttaatttaaaaggatctaggtgaagatcctttttgataatctcatgaccaaaatcccttaacgtgagttttcgttccactgagcgtcagaccccgtagaaaagatcaaaggatcttcttgagatcctttttttctgcgcgtaatctgctgcttgcaaacaaaaaaaccaccgctaccagcggtggtttgtttgccggatcaagagctaccaactctttttccgaaggtaactggcttcagcagagcgcagataccaaatactgtccttctagtgtagccgtagttaggccaccacttcaagaactctgtagcaccgcctacatacctcgctctgctaatcctgttaccagtggctgctgccagtggcgataagtcgtgtcttaccgggttggactcaagacgatagttaccggataaggcgcagcggtcgggctgaacggggggttcgtgcacacagcccagcttggagcgaacgacctacaccgaactgagatacctacagcgtgagctatgagaaagcgccacgcttcccgaagggagaaaggcggacaggtatccggtaagcggcagggtcggaacaggagagcgcacgagggagcttccagggggaaacgcctggtatctttatagtcctgtcgggtttcgccacctctgacttgagcgtcgatttttgtgatgctcgtcaggggggcggagcctatggaaaaacgccagcaacgcggcctttttacggttcctggccttttgctggccttttgctcacatgttctttcctgcgttatcccctgattctgtggataaccgtattaccgcctttgagtgagctgataccgctcgccgcagccgaacgaccgagcgcagcgagtcagtgagcgaggaagcggaagagcgcccaatacgcaaaccgcctctccccgcgcgttggccgattcattaatgcagctggcacgacaggtttcccgactggaaagcgggcagtgagcgcaacgcaattaatgtgagttagctcactcattaggcaccccaggctttacactttatgcttccggctcgtatgttgtgtggaattgtgagcggataacaatttcacacaggaaacagctatgaccatgattacgccaagcgcgcccgggtaatacgactcactataggg

SEQ ID NO: 17 - DNA, 18758 bp, synthetic construct
  source 1..18758: mol_type = other DNA
acgcgaaaaaatgcataacaaaactatcaacctgaaaaaagttaggacaagtgaagattgctagtcccaaagaccagaatcatgggctgtaatgtgatgatggagcttgattatggtggacgagctgcatggctggcattccacataaccaactttgataggtcagatttggaaactatcctaagaggtgctagggtgtgcaatacatggcaagatcagagactctccgtgtaccttgtgggaagggattgcaatttgttaagaccatttgtgcaagctgccaaatttatccataatactaggagaggccaaacattaacacattggttcacaaaaaatatcgtgtttagttctacagggcaagagacagagcctcccattgaccccacatgtgagctgttggtagagctgatcagtggttaagatgacagcacattatgtagttaattaaaacaaagggtaggacaagtcctaatgtccacagctatgaacaagttcactcagaccatctctaaacctgccactatcttgaatatttcagacagtgaagagtcgggcgatgaggcaggggtgggcaaggtgtcccgtaccacacagagctcagagaggtggcttgatttgctcattgaaaagttccagccgagcctacaaaacatcactagatacatcaactggaacttcatcaggatctgcaatgataggcttaaaaaagaaaaaatggggtacattgaggccaagcaatatgtggaagacatggcttggatggtgatagcatctgaggcagacagcattgagtggaagtgcataaggaggcaggagaaagtgactggggtgaaatacccaaagttcttctttgtacaacacaaagaggactggattgagtgcacaggatgcattccgtacccaggccatgacttgatctatgatgaggatgatgatgactgagctgactcagatcactccaaccagcagagagatccaccacctatagcaagtgatgtagtatttagtctatgattagttatagaaaaacattaggataaatacacatcctaggccgggccaaaatgtctctagacagattgaagctcaatgatgtctcaaacaaggatagcctgctgtccaactgcaaatacagtgttaccagatccacaggcgatgtaaccagtgtgtctggtcatgctatgcagaaagcccttgcaaggacactcggcatgttcttacttactgccttcaaccgttgcgaagaagtggcagaaatagggctccaatatgccatgtccttgctaggcagagatgatagcatcaagatattaagagaagccggctacaatgtaaaatgtgtggacacacagctcaaggactttacaatcaaattacaaggaaaggaatacaaaatacaagtcctagatatagtgggaatagatgcagccaatttagctgatctagagatacaagccagaggagtggtagcaaaagaactcaaaacaggagccaggctacctgacaatcggaggcatgatgcaccagattgtggtgtgatagttctctgtattgcagcattagttgtttccaaattagctgcaggggacaggggaggacttgatgctgtggaaagaagggctttaaatgtgctgaaagccgagaaagccaggtaccccaacatggaggtcaagcagatagctgaaagtttttatgatctgtttgaaaggaagccttattacattgatgtcttcatcacttttggcctggcccagtctagtgtcaagggaggcagcaaagttgaggggctgttttcaggtctcttcatgaatgcatacggggcaggacaagttatgctgaggtggggtttactggcaaaatctgtcaagaacatcatgctaggccatgctagtgtacaagctgagatggaacaggtggttgaggtttacgaatatgctcagaagcaaggaggggaggcaggattctatcacatcagaaataatccaaaagcttcacttctctctttgaccaattgtcctaatttcaccagtgttgtgcttggcaatgctgcaggtttaggcatcatagggtcatataagggtgctcctaggaatagagaactctttgatgctgccaaagattatgcagaaagattaaaggacaacaatgtaattaactacagtgcattaaacttgactgcagaagaaagagagctgatcagccagcagctgaacattgttgatgacactcctgatgatgatatttaattaaaactggaaaatgtaggataaatagccgccaccatgttcgtgtttctggtgctgctgcctctggtgagctcccagtgcgtgaacctgaccacaaggacccagctgccccctgcctataccaattccttcacacggggcgtgtactatcccgacaaggtgtttagatctagcgtgctgcactccacacaggatctgtttctgcctttcttttctaacgtgacctggttccacgccatccacgtgagcggcaccaatggcacaaagcggttcgacaatccagtgctgccctttaacgatggcgtgtacttcgcctccaccgagaagtctaacatcatcagaggctggatctttggcaccacactggacagcaagacacagtccctgctgatcgtgaacaatgccaccaacgtggtcatcaaggtgtgcgagttccagttttgtaatgatccattcctgggcgtgtactatcacaagaacaataagtcttggatggagagcgagtttcgcgtgtattcctctgccaacaattgcacatttgagtacgtgtcccagcccttcctgatggacctggagggcaagcagggcaatttcaagaacctgagggagttcgtgtttaagaatatcgatggctacttcaagatctactccaagcacaccccaatcaacctggtgcgcgacctgccacagggcttctctgccctggagccactggtggatctgcccatcggcatcaacatcacccggtttcagacactgctggccctgcacagaagctacctgacaccaggcgacagctcctctggatggaccgcaggagctgccgcctactatgtgggctatctgcagcccaggaccttcctgctgaagtacaacgagaatggcaccatcacagacgccgtggattgcgccctggatcccctgtctgagaccaagtgtacactgaagagctttaccgtggagaagggcatctatcagacaagcaatttcagggtgcagcctaccgagtccatcgtgcgctttcccaatatcacaaacctgtgcccttttggcgaggtgttcaacgcaacccgcttcgccagcgtgtacgcctggaataggaagcgcatctccaactgcgtggccgactattctgtgctgtacaacagcgcctccttctctacctttaagtgctatggcgtgagccccacaaagctgaatgacctgtgctttaccaacgtgtacgccgattccttcgtgatcaggggcgacgaggtgcgccagatcgcccctggccagacaggcaagatcgccgactacaattataagctgcctgacgatttcaccggctgcgtgatcgcctggaactctaacaatctggatagcaaagtgggcggcaactacaattatctgtaccggctgtttagaaagtctaatctgaagccattcgagagggacatctccacagagatctaccaggccggctctaccccctgcaatggcgtggagggctttaactgttatttccctctgcagagctacggcttccagccaacaaacggcgtgggctatcagccctaccgcgtggtggtgctgtcttttgagctgctgcacgcacctgcaacagtgtgcggaccaaagaagagcaccaatctggtgaagaacaagtgcgtgaacttcaacttcaacggactgaccggcacaggcgtgctgaccgagtccaacaagaagttcctgccttttcagcagttcggcagggacatcgcagataccacagacgccgtgcgcgaccctcagaccctggagatcctggatatcacaccatgctccttcggcggcgtgtctgtgatcacaccaggcaccaatacaagcaaccaggtggccgtgctgtatcaggacgtgaattgtaccgaggtgcccgtggcaatccacgcagatcagctgacccctacatggcgggtgtactctaccggcagcaacgtgttccagacaagagccggatgcctgatcggagccgagcacgtgaacaatagctatgagtgcgacatccctatcggcgccggcatctgtgcctcctaccagacccagacaaactccccacggagagcccggtctgtggccagccagtccatcatcgcctataccatgagcctgggcgccgagaattccgtggcctactccaacaattctatcgccatccctaccaacttcacaatctccgtgaccacagagatcctgccagtgagcatgaccaagacatccgtggactgcacaatgtatatctgtggcgattccaccgagtgctctaacctgctgctgcagtacggctctttttgtacccagctgaatagagccctgacaggcatcgccgtggagcaggacaagaacacacaggaggtgttcgcccaggtgaagcagatctacaagaccccacccatcaaggactttggcggcttcaacttcagccagatcctgcccgatcctagcaagccatccaagcggtcttttatcgaggacctgctgttcaacaaggtgaccctggccgatgccggcttcatcaagcagtatggcgattgcctgggcgacatcgccgccagagacctgatctgtgcccagaagtttaatggcctgaccgtgctgcctccactgctgacagatgagatgatcgcccagtacacatctgccctgctggccggcaccatcacaagcggatggaccttcggcgcaggagccgccctgcagatcccctttgccatgcagatggcctatcggttcaacggcatcggcgtgacccagaatgtgctgtacgagaaccagaagctgatcgccaatcagtttaactccgccatcggcaagatccaggactctctgagctccacagccagcgccctgggcaagctgcaggatgtggtgaatcagaacgcccaggccctgaataccctggtgaagcagctgtctagcaacttcggcgccatctcctctgtgctgaatgatatcctgagcaggctggacaaggtggaggcagaggtgcagatcgaccggctgatcacaggcagactgcagtccctgcagacctacgtgacacagcagctgatcagggcagcagagatcagggcctctgccaatctggccgccaccaagatgagcgagtgcgtgctgggccagtccaagagagtggacttttgtggcaagggctatcacctgatgagcttcccacagtccgcccctcacggagtggtgtttctgcacgtgacctacgtgccagcccaggagaagaacttcaccacagcaccagcaatctgccacgatggcaaggcacactttcctagggagggcgtgttcgtgagcaacggcacccactggtttgtgacacagcgcaatttctacgagccacagatcatcaccacagacaatacattcgtgtccggcaactgtgacgtggtcatcggcatcgtgaacaataccgtgtatgatcctctgcagccagagctggactcttttaaggaggagctggataagtacttcaagaatcacaccagccccgacgtggatctgggcgacatctctggcatcaatgccagcgtggtgaacatccagaaggagatcgacaggctgaacgaggtggccaagaatctgaacgagtccctgatcgatctgcaggagctgggcaagtatgagcagtacatcaagtggccctggtatatctggctgggcttcatcgccggcctgatcgccatcgtgatggtgaccatcatgctgtgctgtatgacaagctgctgttcctgcctgaagggctgctgttcttgtggcagctgctgtaagtttgatgaggacgatagcgagcctgtgctgaagggcgtgaagctgcactacacctgatagtatttaattaaaactggaaaatgtaggataaatatggagaaattcgcccccgaatttgttggcgaggatgctaacaagaaggcagaggagtttctcaaacatagatccttcccttcggaaaaaccactagctggtataccgaacactgccactcatgtcaccaaatataacatgccccctatattgcgtagctcattcaaactcccttccccgagagttgctgcaaatcttactgaaccctctgctccccctaccactccaccacccacacctccccagaacaaggaagagcagcccaaagagtctgatgttgacattgagactatgcatgtctgtaaggttcctgacaatccggaacacagcaagaagccatgctgctcagatgataccgatactaagaaaactaggaagccgatggtcacctttgtggaacccgaggagaaatttgtcggattgggagctagcttgtacagggagaccatgcagacctttgctgctgatggttatgatgaagaaagcaacctatcgtttgaggagactaaccaagagccgggttcttcatctgtagaacaaagactagatagaatagaggagaaattgtcctacataataggccttttaaacaccataatggtagcgactgctggacctaccactgctagagatgagattagagatgcccttataggcactagagaagaacttattgagatgatcaagtctgacatcttgactgtcaatgacagaatagtggccatggagaagctcagagatgaggaatgctccagagctgacactgatgatggatcagcctgttatttaacagacagagcaaggatactagataagatagtgtccagcaatgctgaagaggctaaggaagatttggatgttgatgacatcatgggcattaatttttagttaattaaaataacaacaggacaaataatggaggcctacttggtagagatgtaccatggtgtcccatatacagctgcagtacagctaaacttggttgaaaaacattcagccaacatatcactaactgtgtggataccgatgtttcaaacatctctaccaaagaactccgttatggacctgctacatgatgttacagtcatttgtacacagatatcaacagtgcatggtcccatgatcaaggtagatctgagctcttccaatgcaggtttagctaccatgccaaggcaattcttgataaatgctatcatagctttggatgactggggcaacatggattacgaagtgcctgttgcttttgataaaaagagcttctgtgtgacaattcttaagcctaaaaacatgctttacactgtacccagcattactcccactaatcgacctactcatgagctgatagctgtctgctctttccataacagggtaacattaaagtcattcaatatacctgtcttcatcagagcactgtctatcagacagcaggaccttgatagtgtggagcaggctataagctccgatgtggaccatgctataacaacagctagggtggctccctatgcagggcttacacttgtgatcaacatcacatccaccaaaggagcattcaaactgctaaaggcaggtagtcagattcttgcagaactgggtccctatctgacgcaggtgagcctacatgatgtgattatgaactggaaacatacaggcacttcctacatactcaagagctcctcaacaagtggatgaaaaagagaaagtcaccattgatcagctcaatccacaactacaaccccacgatttcacacagcacaacaaccaccgccaccaacatccacatgacaaccacacatacacacccacatacatatatacacatatcttagttaaataaaatcaggataaataatggatcctaacatgacctcacaccagatcaccctcgagatcaacatgaccagcagccgtattggcacatacactacaccagccccaacagctcttctccttgcatgtgccgtcatcaacacagtgtgtgcgctgataatggcctgcagcagtagaagcactgccacatcaggcattgtcagcagccaatgcacagttcatcccaatcaccctccaccaagttatggcgtcaatgtaactggtctgccgggtaacctatactcaaggaacactacataacattataaataacagaaattatccttcaataaaccccaggccagacagctttaccctgctagacgattcaatcagcccttgcagtatgtcgtctagttaacaaaaaaccggtaggataagtactatcctattggaaccaaacgagacctgtagagcagctcacacaagagaaccacaagctgacttcacctagtatgggaaggaacttagaagtgagtggcagcattaccaatttgaactttgagagaactcagcatcctgacacatttaggactgttgtaaaagtgaaccaaatgtgtaagcttattgcaggtgtgctcacaagtgctgctgtggcagtttgtgtgggggtcataatgtattctgttttcacatcaaaccacaaggccaactccacgcagaatgccacgacccggaacagcacatccacccctccccaaccaaccgccggtctgcccaccacagagcaagggaccatccccagattcaccaaaccccccaccaaaaccgccacccaccatgagatcacagagcccgtcaaaatggcaacaccttcagaggatccctaccaatgctccagcaatggttatttggaccgacctgatttacctgaaaatttcaaactcgtattggatgttatatgcaagcctccaggtcctgaacatcacaacaccagctgttatgagaaacgtgaaatcaacccaggaagtgtttgccctgatcttgtaacaatgaaggcaaacatgggcttaaacaatggtggtggggaggatgctgcaccttatatagaggttaccaccctttctacgtactccaacaaaagggcaatgtgtgtccacaatgggtgtgatcaaggcttctgtttcttcctttctggtttaagcactgatcaggagagagctgtgctagagcttggaggtcaacaggctatcatggagttgcattatgattcctactggaaacactattggagtaactctaattgtgttgttcccagaacaaactgcaacctgacagaccaaactgagattttgtttcctaggtttaacaacaagaatcagtctcagtgtaccacctgtgcagattcagctggcctagataacaaattttatctcacatgtgatgggcttttaagaaccctccctctagttggactacccagcctaagtcctcaggcttacaaagctgtacccacacaaactacaggcaccaccacggcaccaacatcagagacgaggcacccaacccctgcacccaggaggtccaaacctctcagtcggaagaagagagctttatgtggtgtagactcaagcagagaacccaaaccaacaatgccttactggtgtcctatgctccaattatttccaaggaggtctaattcttaagtgacctattcctgaattaacttcagaataagtaccaaccttatcagtagttaatgaaaactaagctttgatataataggacaaatatgattcctggcaggatctttctagtccttctggtgatcttcaacaccaagccaattcacccaaatacattaacagaaaaattctatgagtccacatgtagtgttgagactgcaggttataagagtgcccttagaacaggttggcatatgacagttatgtcaattaagttgtctcaaataaatattgagtcatgcaagagcagcaactcgttattggctcatgagcttgcaatctatagtagtgcagtggatgaattgagaacgttatcatccaatgccttgaagtccaaaaggaagaagaggttcctcggtttgattcttggtctcggagctgcagtcactgccggggtggctttagccaagacagtgcaacttgaaagtgagattgcattgattagagatgcagtgagaaatacaaatgaggctgttgttagcctaaccaacggcatgtcagtgttggctaaagtggtggatgatttgaaaaacttcatatctaaagaattactcccaaaaataaaccgagtctcttgtgatgtgcacgacatcactgccgtcattagattccaacagctcaacaaaagacttttggaagtatctcgtgaattttcatctaatgcaggattaacacacactgtttcatcttttatgttaacagaccgggaactcacctccattgtaggcggcatggctgtttcagcaggccaaaaagagataatgctatctagcaaagctataatgagaagaaatgggttagcaatattaagttcagtcaacgctgacacactggtttatgtaatacaactcccattatttggtgttatggacacagattgttgggtaataagaagttctatagactgtcataacatagcagacaagtatgcttgtttggctagagctgataatggctggtattgtcacaatgctggctcattatcatacttcccgtcgccaacggattgtgagatccacaatgggtatgctttctgtgacactctaaaaagtctaactgtacctgtaacatcacgagaatgcaactcaaacatgtataccactaactacgattgtaagatttccacaagtaaaacttatgtgagtacagcggtactgactacaatgggttgcttggtatcttgttatggtcataacagttgcacagtcatcaataatgacaaaggtataataaggactctgccagatggttgccactacatctccaacaaaggtgtggacagggttcaagtaggtaacactgtttactatcttagcaaagaagttggcaagtcaattgttgtcagaggggaaccattggtcttgaaatatgaccctttgagtttccctgacgataaatttgatgttgctataagagatgtggagcatagcatcaatcagacacgcacattcttgaaggcctctgatcagttattggacttaagtgaaaacagagagaataaaaatttaaacaagtcatatatactaacaactctgctcttcgttgtaatgcttattataataatggctgtcatagggttcattctgtataaggtattgaaaatgatcagagacaacaagttgaaatccaaaagtacacctggcctcacagttttatcatgacaattgtaccaaaccataattgagttagttaattaaaaacttaggataagtgacaatccagacccaacacctctttcaactctcaaggataaggtaggatgagtgtgagaccttgcaaatttgaggttcaagggttttgttccagagggaggaattgcaagtatagtcataaatattgggaatggcctttgaaaactcttatgctcaggcagaactacatgcttaataggatttataggttcctcgacaccaacacagatgcaatgtcagatgtcagcggatttgatgcaccacaaaggactgctgagtatgccttgggaaccataggtgtgctgaaaagttacctggaaaaaactaacaacatcactaaatcaatagcttgtggcagtttgatcactgtattgcagaacttggatgttggtctagtaatacaagcaagagatagcaacactgaggacaccaattacttgagaagttgcaacactatactgtcttatatagacaagatacacaagaagagacaaattattcacattctcaaaagactgccagtaggagtactatgcaatctgatccaatctgtcatctccatcgaggagaagataaattcttctatgaaaacagaatgataaggctgcctaaatactatccagccatactgcataagatgtatattattagagtaaatagaaacctcacttacgatgggtctggaccatccacaataatagatgcaggaaagtctgtggtgtggaatcgtgttgatgtgatagcttgtgtgaaagaggccttgtgctgcatagaattcagctggaataaccaagtgatcatagactttgattatagccaggccagatgatgtggactgtattcctttttttgtcagtaatcagttattaacccaaaattgttaattatgtagactttaagttaactaacttcatgttaattcaatagttatataaaaaaatattcgaattaggatcaatatggatcctattgatgaacaagaagttaatgtgtacttgccggatagctacttaaagggtgttatatcttttagtgaaactaatgctcttggcagctgtatcattggtagacctttcttgaaggatgactttactgccactacttcaatccgtaaccccctaattgaacataaaagaataagggacactaaattagtaaaaaatattgtttcaaaccctcaatataggttagtggagcctctccaaatgcagcatgagctcttgagtgtactatcgcccaatttcatattgcacactgccaacttaaggaaaattatacaaagaagtgttgacataacagataaaaagttgaaccccattttgcacattttgaatcttaattctcctaaccaagagggtaaggtgtcggaacggctaactaggctaattaagaaacatctctctcacatacctaattgggtaagcagctggtacaatatatgggtcaatcttaacaacttactgcaggagtaccgttcaaaggaagttatagaccataactgtgttctgactaggcaattgtctggaagtttcatacatgtggtcatgagtcaatatggagttgtgataattagcaaaaaaagtaaaagatatacaatgtgtacttataaccaattcctaacctggaaggaccttgccttgagcagatttaatgccaattatgtggtctggctaagtaatgtgttaaacacactcaacgaggggttgggattaaggtgtagattaaaaggtcatctgctcagtaagttgtacatttccactgacatctttttatcttcaacatctaatgaattttataatgtggtcaaggaatttgagggcttcatcatgtcactgatattgaaacaaactgaggaagccttatttagcacaaggttttataataacatgttgaacaacttaattgatgccattgatagggctcgactagagtatctggcccgctgtgccaattcagctgccaggattaatttacctagtacagatgttatgatagcatcattgggtgatatcttatctttgataaacgttttaggtgaatccaaccttaacaacttaagtgagttatattttatcttcaggatatttggtcaccctatggttgatgagaggaaggccatggatgcagtcagagataactgttgtgaaacaaagtttctgacggctaagaaccttgcatcgttaagaggagcatatgtttatagaattatcaaaggattcgtagcaaattataacaggtggccttacataaaaactagagtttgccttacaccaacatggattaactatcttgacaccaattcatgtccctcattattagagatgacagaagatgattttattgtgttagctggagtgcactttataagagaattccacatcccaaagctaactgatctggagattatattaaatgacaaggccatatctcctccaaaatcactcatttggtcatgctttccaaaaaactacatacctcaggttatacaagatgagtatgcccggaggtattgtagagctaaagcacctttgaagacaagacgtgtcttggagttctacttacaggacaaggatttcaagttggatcagctccatagagtagtagtgaaccaggactaccttaatgataaagaacatataatttctttaacaggaaaagaaagagagttgggtgttggtaggatgtttgccatgcaacctgggaagcagaggcaagtccaaattttagcagagaagctgttggctgataacatcctgcaattctttccggagacactgactagatacggtgatttggagctgcaaaagatactagagttaaaagctggactttcaaataaaaatgacagatctaaagactcctacaataattatataagtaggtgctcattaattactgatttaagtaaatttaaccaagcttttaggtacgagtcatcctgtgtgtgtagtgatcttttagatgagctacatgggactcaaagcttattctcttggctgcatttaacagtaccactgactactataatgtgtacatataggcatgcgccgccggacactggaaacaactataatgtagatgatattgctgagcagagtggactctaccgctaccacatgggcgggattgagggctggtgccagaagctctggacaacagaggccattgctttgctagatactgtagctgtgaagggccgtttccagctaacttcattaataaatggcgacaaccaaagtattgatatttcaaaaccaacaaggctggggaccaggactcaaagtgaagcagattatgatttggcaataaattctttaagattaatatcagcagcttataaaggcattggacataaattaaaagaaggtgagacctacttgtcacgtgacatgcagttcatgagtaaaacaatacaacatgaaggggtctactacccggcctccatcaagaaaatattaagagttggtccctggatcaacacaatattagatgatataaaaacttcaacagaaagtattggttctctaactcaagaactagaatataaaggtgaaagtttaatgagcagcctgctgctgaggaacttctggctctacagattatattcagtggatttaaaagatcattctttgtgtggaaagcagctctacagatccttaataaaagtgttaaaacatttgaagaggtgcttcaacctggagaaccttggggaatgtttggaattatttttaaatgtgcccatgcagtttggaggtgctgacccaaatgtcatctacaggagcttctacagaagaactccagattttctaacagaaagtataactcatctcatcctcattttaaaacattttagaagagatttggaattcaacaaagataatgtctccaaagctgttctttctttgctagagttcaccaagaatgattctgcagaatttgtaactttgatgagagatcctcaagcaattggtagtgagaggcaggccaagatcacttcagacatcaacagaacagctgtaacttcagtgttatcaaatgctccaaatgaaatatttagaacttcagctcttcattacagcagcacagaaaatgaattaaatggaatagcaagtggagtttctcctgtttatcctcatggtcttcgagttttatatgaaagtttacctttttataaagcagagaagattgtcaacatggtttctgggaccaagtccatcaccaacatactggagaagacatcagccatctcctacacagatataattcgagccaccaacatgatggtggagaacctcactttgctaacaagaataatgaaaccaggtgctgacacatctttggatcctgacacaatagtaataacaatattatcaaaaataataagagataaatcctgggatgttggtgatataattggtgtcacttccccatctcctgtctcctgcttcaaggtggtctacacatcaactctacaaaataattcagtagtaatagaaagatacacaacagacacctacacaagaggtaagagaggccccaccaagccctgggtgggcagcagcacacaggagaagaagtccatgcctgtctacaacagacaagttttaacaagaggacaaagagatcaaatagaaaatatagcaaagctggagtgggtgttttcttcagtagcaaatattgattctttgctaaatgagctcagcaccatgactttgggtctttctctaaggaaatgtagacaactttttccaacatatttaagtttaaacttcctgcacaggctttctgtcagcagcaggcccagagaatatccttcttctcttcctgcctacaggacaacaaattttcattttgatactggaccaataaataaagtgttaacagaaagatttggagatgaagatataaatttggtatttcaaaatgcaatatcatatggtctttccaccatgtctttggtggagcagtttactggtgtctgtccaaataaagttttgctggtgcccaagctacaagaaatacaactaatgaaagttccaatatttcaaggtggcttcaacctacaaagtataattccaataataaggcagcagcacatgttcctgcccaaccacatcactccagcccagtatattgaattatttctttcttcaaaacaatttcattcaagaataaatttaaaacacaacaacagatttaaacttgttttacaaaaagattattttaatggggagaacatgatagaaactttgtccacctgtttggcaggccactggatcatcattttgatgctaatgaaggagagtcaggggatatttgacaaggagtggtatgatggttttgtaacagaccacatgttcctggacctgcagctcttcctctcctccttcaagacatttctaactgtcttcaactttgcttatttaaaagttggttcaaatatagaagaaataacaggaaatcaagccaacctgctggagctgctggacctgggctactggaagaacatgtataaagtattttcagagaccaaggtgcggctggctttgctaaaacaagatttatcatttaattctgtgaagaacagcagcagcttccggcactggtttataaattctctacaagaagtacaatgtacttctgtgccttgggtggtaaatgtaacaagaaatccaactcatttaaaaggtgttctacagtacatgaagatgatagaaagtggcatgattcaaggttattcagcaaatatttcttcagttttaagtatcccatataattatccagacatggcgcacatgatgacaaaaataataagaaatcgaggccacatgtcctatgattatccaaagatgaagaaaagtttaactttctccatgacagacatgagtgacagctacatgctcaacctcttccccaaagtagaatgttcttacatgagtggttatttggataaactagatgatactctacaacttctaaagaaacctcctgttggaagaaaagttccttctgtggctttgccctggcaccactgcaacagatacaactttgtcttcagcagcacaggctgcaaagtttctgtcattgacatgcttccaaaacatttccgaagaagtaatttaaaagtaatatgttttattggagaaggggcgggcaacctcatgctaagagctgttttggaagttggtggaaatataaaattaatatatagatccttaaaagatcctgatgatcatcatgttcctgtagaatttctaagattaaaaccttgttatccttatattgatactggtggcagtttatctttggcttcaacagatgccaccaacaaggcccactgggattatttacatcttcactggacagatcctttaaatttaatagtatgtgatgcagaaataagtggtgtgaagcactggctaaaaattcttcacaggtggtatgagcacatgacttcctgcaagcactgtttaaaatcagaacatgataaatatttaataataaaatatcatgctcaagatgatttaatagatcttcctcatggtgtcaggctactaaaatgtaacatctgcctgggctccaaactaagtggcagtgagagctacctgctcattggtcttggtctttcaaataaacttcctgtctacagtgaagttcttcattcaaaacttcttttggcagaatgtcatcagtttcatcatccaaaatatttggatgtttctggaataaatacaaatataaaatccttaataccaatgttggattatccaataacttacaacaagatcaccactttgctagaaagtgtgcgggagctttcttcaaataaaaacaagaacaccatgtggattggaagaaatcctgtctaccataataaatggctaaagaggaaatatttcaacattttaaaatggctaaaatactgtatagaacttcctgccttcaggatggattataattcatttgagagaatagaaatgctttatccaaatttaagagatttggtagattctgtttctacttcagagctgaagaaagtaataaaagtaacaggcatcctcttcaggagcaacaccatgtgaattaatatgccaatgctaacatgtcatccccactactttttttgttcaatcactctcagtctagacatgtgagaagatcccaaacccaactgcacccctcccactcgaaatcagttgtagcctcagcagctccatctgccatgatctctgaccagcagcaaatgtattattattttaatttgtctatagttaacaaaaaattgatatctcacaggttgtaaacatagttcttttataattattgttagttaaactattgtgtttgacttcctttgggtatttttttcccgt

SEQ ID NO: 18 - DNA, 21750 bp, synthetic construct
  source 1..21750: mol_type = other DNA
acgcgaaaaaatgcataacaaaactatcaacctgaaaaaagttaggacaagtgaagattgctagtcccaaagaccagaatcatgggctgtaatgtgatgatggagcttgattatggtggacgagctgcatggctggcattccacataaccaactttgataggtcagatttggaaactatcctaagaggtgctagggtgtgcaatacatggcaagatcagagactctccgtgtaccttgtgggaagggattgcaatttgttaagaccatttgtgcaagctgccaaatttatccataatactaggagaggccaaacattaacacattggttcacaaaaaatatcgtgtttagttctacagggcaagagacagagcctcccattgaccccacatgtgagctgttggtagagctgatcagtggttaagatgacagcacattatgtagttaattaaaacaaagggtaggacaagtcctaatgtccacagctatgaacaagttcactcagaccatctctaaacctgccactatcttgaatatttcagacagtgaagagtcgggcgatgaggcaggggtgggcaaggtgtcccgtaccacacagagctcagagaggtggcttgatttgctcattgaaaagttccagccgagcctacaaaacatcactagatacatcaactggaacttcatcaggatctgcaatgataggcttaaaaaagaaaaaatggggtacattgaggccaagcaatatgtggaagacatggcttggatggtgatagcatctgaggcagacagcattgagtggaagtgcataaggaggcaggagaaagtgactggggtgaaatacccaaagttcttctttgtacaacacaaagaggactggattgagtgcacaggatgcattccgtacccaggccatgacttgatctatgatgaggatgatgatgactgagctgactcagatcactccaaccagcagagagatccaccacctatagcaagtgatgtagtatttagtctatgattagttatagaaaaacattaggataaatacacatcctaggccgggccaaaatgtctctagacagattgaagctcaatgatgtctcaaacaaggatagcctgctgtccaactgcaaatacagtgttaccagatccacaggcgatgtaaccagtgtgtctggtcatgctatgcagaaagcccttgcaaggacactcggcatgttcttacttactgccttcaaccgttgcgaagaagtggcagaaatagggctccaatatgccatgtccttgctaggcagagatgatagcatcaagatattaagagaagccggctacaatgtaaaatgtgtggacacacagctcaaggactttacaatcaaattacaaggaaaggaatacaaaatacaagtcctagatatagtgggaatagatgcagccaatttagctgatctagagatacaagccagaggagtggtagcaaaagaactcaaaacaggagccaggctacctgacaatcggaggcatgatgcaccagattgtggtgtgatagttctctgtattgcagcattagttgtttccaaattagctgcaggggacaggggaggacttgatgctgtggaaagaagggctttaaatgtgctgaaagccgagaaagccaggtaccccaacatggaggtcaagcagatagctgaaagtttttatgatctgtttgaaaggaagccttattacattgatgtcttcatcacttttggcctggcccagtctagtgtcaagggaggcagcaaagttgaggggctgttttcaggtctcttcatgaatgcatacggggcaggacaagttatgctgaggtggggtttactggcaaaatctgtcaagaacatcatgctaggccatgctagtgtacaagctgagatggaacaggtggttgaggtttacgaatatgctcagaagcaaggaggggaggcaggattctatcacatcagaaataatccaaaagcttcacttctctctttgaccaattgtcctaatttcaccagtgttgtgcttggcaatgctgcaggtttaggcatcatagggtcatataagggtgctcctaggaatagagaactctttgatgctgccaaagattatgcagaaagattaaaggacaacaatgtaattaactacagtgcattaaacttgactgcagaagaaagagagctgatcagccagcagctgaacattgttgatgacactcctgatgatgatatttaattaaaactggaaaatgtaggataaatagccgccaccatgttcgtgtttctggtgctgctgcctctggtgagctcccagtgcgtgaacctgaccacaaggacccagctgccccctgcctataccaattccttcacacggggcgtgtactatcccgacaaggtgtttagatctagcgtgctgcactccacacaggatctgtttctgcctttcttttctaacgtgacctggttccacgccatccacgtgagcggcaccaatggcacaaagcggttcgacaatccagtgctgccctttaacgatggcgtgtacttcgcctccaccgagaagtctaacatcatcagaggctggatctttggcaccacactggacagcaagacacagtccctgctgatcgtgaacaatgccaccaacgtggtcatcaaggtgtgcgagttccagttttgtaatgatccattcctgggcgtgtactatcacaagaacaataagtcttggatggagagcgagtttcgcgtgtattcctctgccaacaattgcacatttgagtacgtgtcccagcccttcctgatggacctggagggcaagcagggcaatttcaagaacctgagggagttcgtgtttaagaatatcgatggctacttcaagatctactccaagcacaccccaatcaacctggtgcgcgacctgccacagggcttctctgccctggagccactggtggatctgcccatcggcatcaacatcacccggtttcagacactgctggccctgcacagaagctacctgacaccaggcgacagctcctctggatggaccgcaggagctgccgcctactatgtgggctatctgcagcccaggaccttcctgctgaagtacaacgagaatggcaccatcacagacgccgtggattgcgccctggatcccctgtctgagaccaagtgtacactgaagagctttaccgtggagaagggcatctatcagacaagcaatttcagggtgcagcctaccgagtccatcgtgcgctttcccaatatcacaaacctgtgcccttttggcgaggtgttcaacgcaacccgcttcgccagcgtgtacgcctggaataggaagcgcatctccaactgcgtggccgactattctgtgctgtacaacagcgcctccttctctacctttaagtgctatggcgtgagccccacaaagctgaatgacctgtgctttaccaacgtgtacgccgattccttcgtgatcaggggcgacgaggtgcgccagatcgcccctggccagacaggcaagatcgccgactacaattataagctgcctgacgatttcaccggctgcgtgatcgcctggaactctaacaatctggatagcaaagtgggcggcaactacaattatctgtaccggctgtttagaaagtctaatctgaagccattcgagagggacatctccacagagatctaccaggccggctctaccccctgcaatggcgtggagggctttaactgttatttccctctgcagagctacggcttccagccaacaaacggcgtgggctatcagccctaccgcgtggtggtgctgtcttttgagctgctgcacgcacctgcaacagtgtgcggaccaaagaagagcaccaatctggtgaagaacaagtgcgtgaacttcaacttcaacggactgaccggcacaggcgtgctgaccgagtccaacaagaagttcctgccttttcagcagttcggcagggacatcgcagataccacagacgccgtgcgcgaccctcagaccctggagatcctggatatcacaccatgctccttcggcggcgtgtctgtgatcacaccaggcaccaatacaagcaaccaggtggccgtgctgtatcaggacgtgaattgtaccgaggtgcccgtggcaatccacgcagatcagctgacccctacatggcgggtgtactctaccggcagcaacgtgttccagacaagagccggatgcctgatcggagccgagcacgtgaacaatagctatgagtgcgacatccctatcggcgccggcatctgtgcctcctaccagacccagacaaactccccacggagagcccggtctgtggccagccagtccatcatcgcctataccatgagcctgggcgccgagaattccgtggcctactccaacaattctatcgccatccctaccaacttcacaatctccgtgaccacagagatcctgccagtgagcatgaccaagacatccgtggactgcacaatgtatatctgtggcgattccaccgagtgctctaacctgctgctgcagtacggctctttttgtacccagctgaatagagccctgacaggcatcgccgtggagcaggacaagaacacacaggaggtgttcgcccaggtgaagcagatctacaagaccccacccatcaaggactttggcggcttcaacttcagccagatcctgcccgatcctagcaagccatccaagcggtcttttatcgaggacctgctgttcaacaaggtgaccctggccgatgccggcttcatcaagcagtatggcgattgcctgggcgacatcgccgccagagacctgatctgtgcccagaagtttaatggcctgaccgtgctgcctccactgctgacagatgagatgatcgcccagtacacatctgccctgctggccggcaccatcacaagcggatggaccttcggcgcaggagccgccctgcagatcccctttgccatgcagatggcctatcggttcaacggcatcggcgtgacccagaatgtgctgtacgagaaccagaagctgatcgccaatcagtttaactccgccatcggcaagatccaggactctctgagctccacagccagcgccctgggcaagctgcaggatgtggtgaatcagaacgcccaggccctgaataccctggtgaagcagctgtctagcaacttcggcgccatctcctctgtgctgaatgatatcctgagcaggctggacaaggtggaggcagaggtgcagatcgaccggctgatcacaggcagactgcagtccctgcagacctacgtgacacagcagctgatcagggcagcagagatcagggcctctgccaatctggccgccaccaagatgagcgagtgcgtgctgggccagtccaagagagtggacttttgtggcaagggctatcacctgatgagcttcccacagtccgcccctcacggagtggtgtttctgcacgtgacctacgtgccagcccaggagaagaacttcaccacagcaccagcaatctgccacgatggcaaggcacactttcctagggagggcgtgttcgtgagcaacggcacccactggtttgtgacacagcgcaatttctacgagccacagatcatcaccacagacaatacattcgtgtccggcaactgtgacgtggtcatcggcatcgtgaacaataccgtgtatgatcctctgcagccagagctggactcttttaaggaggagctggataagtacttcaagaatcacaccagccccgacgtggatctgggcgacatctctggcatcaatgccagcgtggtgaacatccagaaggagatcgacaggctgaacgaggtggccaagaatctgaacgagtccctgatcgatctgcaggagctgggcaagtatgagcagtacatcaagtggccctggtatatctggctgggcttcatcgccggcctgatcgccatcgtgatggtgaccatcatgctgtgctgtatgacaagctgctgttcctgcctgaagggctgctgttcttgtggcagctgctgtaagtttgatgaggacgatagcgagcctgtgctgaagggcgtgaagctgcactacacctgatagtatttaattaaaactggaaaatgtaggataaatatggagaaattcgcccccgaatttgttggcgaggatgctaacaagaaggcagaggagtttctcaaacatagatccttcccttcggaaaaaccactagctggtataccgaacactgccactcatgtcaccaaatataacatgccccctatattgcgtagctcattcaaactcccttccccgagagttgctgcaaatcttactgaaccctctgctccccctaccactccaccacccacacctccccagaacaaggaagagcagcccaaagagtctgatgttgacattgagactatgcatgtctgtaaggttcctgacaatccggaacacagcaagaagccatgctgctcagatgataccgatactaagaaaactaggaagccgatggtcacctttgtggaacccgaggagaaatttgtcggattgggagctagcttgtacagggagaccatgcagacctttgctgctgatggttatgatgaagaaagcaacctatcgtttgaggagactaaccaagagccgggttcttcatctgtagaacaaagactagatagaatagaggagaaattgtcctacataataggccttttaaacaccataatggtagcgactgctggacctaccactgctagagatgagattagagatgcccttataggcactagagaagaacttattgagatgatcaagtctgacatcttgactgtcaatgacagaatagtggccatggagaagctcagagatgaggaatgctccagagctgacactgatgatggatcagcctgttatttaacagacagagcaaggatactagataagatagtgtccagcaatgctgaagaggctaaggaagatttggatgttgatgacatcatgggcattaatttttagttaattaaaataacaacaggacaaataatggaggcctacttggtagagatgtaccatggtgtcccatatacagctgcagtacagctaaacttggttgaaaaacattcagccaacatatcactaactgtgtggataccgatgtttcaaacatctctaccaaagaactccgttatggacctgctacatgatgttacagtcatttgtacacagatatcaacagtgcatggtcccatgatcaaggtagatctgagctcttccaatgcaggtttagctaccatgccaaggcaattcttgataaatgctatcatagctttggatgactggggcaacatggattacgaagtgcctgttgcttttgataaaaagagcttctgtgtgacaattcttaagcctaaaaacatgctttacactgtacccagcattactcccactaatcgacctactcatgagctgatagctgtctgctctttccataacagggtaacattaaagtcattcaatatacctgtcttcatcagagcactgtctatcagacagcaggaccttgatagtgtggagcaggctataagctccgatgtggaccatgctataacaacagctagggtggctccctatgcagggcttacacttgtgatcaacatcacatccaccaaaggagcattcaaactgctaaaggcaggtagtcagattcttgcagaactgggtccctatctgacgcaggtgagcctacatgatgtgattatgaactggaaacatacaggcacttcctacatactcaagagctcctcaacaagtggatgaaaaagagaaagtcaccattgatcagctcaatccacaactacaaccccacgatttcacacagcacaacaaccaccgccaccaacatccacatgacaaccacacatacacacccacatacatatatacacatatcttagttaaataaaatcaggataaataatggatcctaacatgacctcacaccagatcaccctcgagatcaacatgaccagcagccgtattggcacatacactacaccagccccaacagctcttctccttgcatgtgccgtcatcaacacagtgtgtgcgctgataatggcctgcagcagtagaagcactgccacatcaggcattgtcagcagccaatgcacagttcatcccaatcaccctccaccaagttatggcgtcaatgtaactggtctgccgggtaacctatactcaaggaacactacataacattataaataacagaaattatccttcaataaaccccaggccagacagctttaccctgctagacgattcaatcagcccttgcagtatgtcgtctagttaacaaaaaaccggtaggataagtactatcctattggaaccaaacgagacctgtagagcagctcacacaagagaaccacaagctgacttcacctagtatgggaaggaacttagaagtgagtggcagcattaccaatttgaactttgagagaactcagcatcctgacacatttaggactgttgtaaaagtgaaccaaatgtgtaagcttattgcaggtgtgctcacaagtgctgctgtggcagtttgtgtgggggtcataatgtattctgttttcacatcaaaccacaaggccaactccacgcagaatgccacgacccggaacagcacatccacccctccccaaccaaccgccggtctgcccaccacagagcaagggaccatccccagattcaccaaaccccccaccaaaaccgccacccaccatgagatcacagagcccgtcaaaatggcaacaccttcagaggatccctaccaatgctccagcaatggttatttggaccgacctgatttacctgaaaatttcaaactcgtattggatgttatatgcaagcctccaggtcctgaacatcacaacaccagctgttatgagaaacgtgaaatcaacccaggaagtgtttgccctgatcttgtaacaatgaaggcaaacatgggcttaaacaatggtggtggggaggatgctgcaccttatatagaggttaccaccctttctacgtactccaacaaaagggcaatgtgtgtccacaatgggtgtgatcaaggcttctgtttcttcctttctggtttaagcactgatcaggagagagctgtgctagagcttggaggtcaacaggctatcatggagttgcattatgattcctactggaaacactattggagtaactctaattgtgttgttcccagaacaaactgcaacctgacagaccaaactgagattttgtttcctaggtttaacaacaagaatcagtctcagtgtaccacctgtgcagattcagctggcctagataacaaattttatctcacatgtgatgggcttttaagaaccctccctctagttggactacccagcctaagtcctcaggcttacaaagctgtacccacacaaactacaggcaccaccacggcaccaacatcagagacgaggcacccaacccctgcacccaggaggtccaaacctctcagtcggaagaagagagctttatgtggtgtagactcaagcagagaacccaaaccaacaatgccttactggtgtcctatgctccaattatttccaaggaggtctaattcttaagtgacctattcctgaattaacttcagaataagtaccaaccttatcagtagttaatgaaaactaagctttgatataataggacaaatatgattcctggcaggatctttctagtccttctggtgatcttcaacaccaagccaattcacccaaatacattaacagaaaaattctatgagtccacatgtagtgttgagactgcaggttataagagtgcccttagaacaggttggcatatgacagttatgtcaattaagttgtctcaaataaatattgagtcatgcaagagcagcaactcgttattggctcatgagcttgcaatctatagtagtgcagtggatgaattgagaacgttatcatccaatgccttgaagtccaaaaggaagaagaggttcctcggtttgattcttggtctcggagctgcagtcactgccggggtggctttagccaagacagtgcaacttgaaagtgagattgcattgattagagatgcagtgagaaatacaaatgaggctgttgttagcctaaccaacggcatgtcagtgttggctaaagtggtggatgatttgaaaaacttcatatctaaagaattactcccaaaaataaaccgagtctcttgtgatgtgcacgacatcactgccgtcattagattccaacagctcaacaaaagacttttggaagtatctcgtgaattttcatctaatgcaggattaacacacactgtttcatcttttatgttaacagaccgggaactcacctccattgtaggcggcatggctgtttcagcaggccaaaaagagataatgctatctagcaaagctataatgagaagaaatgggttagcaatattaagttcagtcaacgctgacacactggtttatgtaatacaactcccattatttggtgttatggacacagattgttgggtaataagaagttctatagactgtcataacatagcagacaagtatgcttgtttggctagagctgataatggctggtattgtcacaatgctggctcattatcatacttcccgtcgccaacggattgtgagatccacaatgggtatgctttctgtgacactctaaaaagtctaactgtacctgtaacatcacgagaatgcaactcaaacatgtataccactaactacgattgtaagatttccacaagtaaaacttatgtgagtacagcggtactgactacaatgggttgcttggtatcttgttatggtcataacagttgcacagtcatcaataatgacaaaggtataataaggactctgccagatggttgccactacatctccaacaaaggtgtggacagggttcaagtaggtaacactgtttactatcttagcaaagaagttggcaagtcaattgttgtcagaggggaaccattggtcttgaaatatgaccctttgagtttccctgacgataaatttgatgttgctataagagatgtggagcatagcatcaatcagacacgcacattcttgaaggcctctgatcagttattggacttaagtgaaaacagagagaataaaaatttaaacaagtcatatatactaacaactctgctcttcgttgtaatgcttattataataatggctgtcatagggttcattctgtataaggtattgaaaatgatcagagacaacaagttgaaatccaaaagtacacctggcctcacagttttatcatgacaattgtaccaaaccataattgagttagttaattaaaaacttaggataagtgacaatccagacccaacacctctttcaactctcaaggataaggtaggatgagtgtgagaccttgcaaatttgaggttcaagggttttgttccagagggaggaattgcaagtatagtcataaatattgggaatggcctttgaaaactcttatgctcaggcagaactacatgcttaataggatttataggttcctcgacaccaacacagatgcaatgtcagatgtcagcggatttgatgcaccacaaaggactgctgagtatgccttgggaaccataggtgtgctgaaaagttacctggaaaaaactaacaacatcactaaatcaatagcttgtggcagtttgatcactgtattgcagaacttggatgttggtctagtaatacaagcaagagatagcaacactgaggacaccaattacttgagaagttgcaacactatactgtcttatatagacaagatacacaagaagagacaaattattcacattctcaaaagactgccagtaggagtactatgcaatctgatccaatctgtcatctccatcgaggagaagataaattcttctatgaaaacagaatgataaggctgcctaaatactatccagccatactgcataagatgtatattattagagtaaatagaaacctcacttacgatgggtctggaccatccacaataatagatgcaggaaagtctgtggtgtggaatcgtgttgatgtgatagcttgtgtgaaagaggccttgtgctgcatagaattcagctggaataaccaagtgatcatagactttgattatagccaggccagatgatgtggactgtattcctttttttgtcagtaatcagttattaacccaaaattgttaattatgtagactttaagttaactaacttcatgttaattcaatagttatataaaaaaatattcgaattaggatcaatatggatcctattgatgaacaagaagttaatgtgtacttgccggatagctacttaaagggtgttatatcttttagtgaaactaatgctcttggcagctgtatcattggtagacctttcttgaaggatgactttactgccactacttcaatccgtaaccccctaattgaacataaaagaataagggacactaaattagtaaaaaatattgtttcaaaccctcaatataggttagtggagcctctccaaatgcagcatgagctcttgagtgtactatcgcccaatttcatattgcacactgccaacttaaggaaaattatacaaagaagtgttgacataacagataaaaagttgaaccccattttgcacattttgaatcttaattctcctaaccaagagggtaaggtgtcggaacggctaactaggctaattaagaaacatctctctcacatacctaattgggtaagcagctggtacaatatatgggtcaatcttaacaacttactgcaggagtaccgttcaaaggaagttatagaccataactgtgttctgactaggcaattgtctggaagtttcatacatgtggtcatgagtcaatatggagttgtgataattagcaaaaaaagtaaaagatatacaatgtgtacttataaccaattcctaacctggaaggaccttgccttgagcagatttaatgccaattatgtggtctggctaagtaatgtgttaaacacactcaacgaggggttgggattaaggtgtagattaaaaggtcatctgctcagtaagttgtacatttccactgacatctttttatcttcaacatctaatgaattttataatgtggtcaaggaatttgagggcttcatcatgtcactgatattgaaacaaactgaggaagccttatttagcacaaggttttataataacatgttgaacaacttaattgatgccattgatagggctcgactagagtatctggcccgctgtgccaattcagctgccaggattaatttacctagtacagatgttatgatagcatcattgggtgatatcttatctttgataaacgttttaggtgaatccaaccttaacaacttaagtgagttatattttatcttcaggatatttggtcaccctatggttgatgagaggaaggccatggatgcagtcagagataactgttgtgaaacaaagtttctgacggctaagaaccttgcatcgttaagaggagcatatgtttatagaattatcaaaggattcgtagcaaattataacaggtggccttacataaaaactagagtttgccttacaccaacatggattaactatcttgacaccaattcatgtccctcattattagagatgacagaagatgattttattgtgttagctggagtgcactttataagagaattccacatcccaaagctaactgatctggagattatattaaatgacaaggccatatctcctccaaaatcactcatttggtcatgctttccaaaaaactacatacctcaggttatacaagatgagtatgcccggaggtattgtagagctaaagcacctttgaagacaagacgtgtcttggagttctacttacaggacaaggatttcaagttggatcagctccatagagtagtagtgaaccaggactaccttaatgataaagaacatataatttctttaacaggaaaagaaagagagttgggtgttggtaggatgtttgccatgcaacctgggaagcagaggcaagtccaaattttagcagagaagctgttggctgataacatcctgcaattctttccggagacactgactagatacggtgatttggagctgcaaaagatactagagttaaaagctggactttcaaataaaaatgacagatctaaagactcctacaataattatataagtaggtgctcattaattactgatttaagtaaatttaaccaagcttttaggtacgagtcatcctgtgtgtgtagtgatcttttagatgagctacatgggactcaaagcttattctcttggctgcatttaacagtaccactgactactataatgtgtacatataggcatgcgccgccggacactggaaacaactataatgtagatgatattgctgagcagagtggactctaccgctaccacatgggcgggattgagggctggtgccagaagctctggacaacagaggccattgctttgctagatactgtagctgtgaagggccgtttccagctaacttcattaataaatggcgacaaccaaagtattgatatttcaaaaccaacaaggctggggaccaggactcaaagtgaagcagattatgatttggcaataaattctttaagattaatatcagcagcttataaaggcattggacataaattaaaagaaggtgagacctacttgtcacgtgacatgcagttcatgagtaaaacaatacaacatgaaggggtctactacccggcctccatcaagaaaatattaagagttggtccctggatcaacacaatattagatgatataaaaacttcaacagaaagtattggttctctaactcaagaactagaatataaaggtgaaagtttaatgagcagcctgctgctgaggaacttctggctctacagattatattcagtggatttaaaagatcattctttgtgtggaaagcagctctacagatccttaataaaagtgttaaaacatttgaagaggtgcttcaacctggagaaccttggggaatgtttggaattatttttaaatgtgcccatgcagtttggaggtgctgacccaaatgtcatctacaggagcttctacagaagaactccagattttctaacagaaagtataactcatctcatcctcattttaaaacattttagaagagatttggaattcaacaaagataatgtctccaaagctgttctttctttgctagagttcaccaagaatgattctgcagaatttgtaactttgatgagagatcctcaagcaattggtagtgagaggcaggccaagatcacttcagacatcaacagaacagctgtaacttcagtgttatcaaatgctccaaatgaaatatttagaacttcagctcttcattacagcagcacagaaaatgaattaaatggaatagcaagtggagtttctcctgtttatcctcatggtcttcgagttttatatgaaagtttacctttttataaagcagagaagattgtcaacatggtttctgggaccaagtccatcaccaacatactggagaagacatcagccatctcctacacagatataattcgagccaccaacatgatggtggagaacctcactttgctaacaagaataatgaaaccaggtgctgacacatctttggatcctgacacaatagtaataacaatattatcaaaaataataagagataaatcctgggatgttggtgatataattggtgtcacttccccatctcctgtctcctgcttcaaggtggtctacacatcaactctacaaaataattcagtagtaatagaaagatacacaacagacacctacacaagaggtaagagaggccccaccaagccctgggtgggcagcagcacacaggagaagaagtccatgcctgtctacaacagacaagttttaacaagaggacaaagagatcaaatagaaaatatagcaaagctggagtgggtgttttcttcagtagcaaatattgattctttgctaaatgagctcagcaccatgactttgggtctttctctaaggaaatgtagacaactttttccaacatatttaagtttaaacttcctgcacaggctttctgtcagcagcaggcccagagaatatccttcttctcttcctgcctacaggacaacaaattttcattttgatactggaccaataaataaagtgttaacagaaagatttggagatgaagatataaatttggtatttcaaaatgcaatatcatatggtctttccaccatgtctttggtggagcagtttactggtgtctgtccaaataaagttttgctggtgcccaagctacaagaaatacaactaatgaaagttccaatatttcaaggtggcttcaacctacaaagtataattccaataataaggcagcagcacatgttcctgcccaaccacatcactccagcccagtatattgaattatttctttcttcaaaacaatttcattcaagaataaatttaaaacacaacaacagatttaaacttgttttacaaaaagattattttaatggggagaacatgatagaaactttgtccacctgtttggcaggccactggatcatcattttgatgctaatgaaggagagtcaggggatatttgacaaggagtggtatgatggttttgtaacagaccacatgttcctggacctgcagctcttcctctcctccttcaagacatttctaactgtcttcaactttgcttatttaaaagttggttcaaatatagaagaaataacaggaaatcaagccaacctgctggagctgctggacctgggctactggaagaacatgtataaagtattttcagagaccaaggtgcggctggctttgctaaaacaagatttatcatttaattctgtgaagaacagcagcagcttccggcactggtttataaattctctacaagaagtacaatgtacttctgtgccttgggtggtaaatgtaacaagaaatccaactcatttaaaaggtgttctacagtacatgaagatgatagaaagtggcatgattcaaggttattcagcaaatatttcttcagttttaagtatcccatataattatccagacatggcgcacatgatgacaaaaataataagaaatcgaggccacatgtcctatgattatccaaagatgaagaaaagtttaactttctccatgacagacatgagtgacagctacatgctcaacctcttccccaaagtagaatgttcttacatgagtggttatttggataaactagatgatactctacaacttctaaagaaacctcctgttggaagaaaagttccttctgtggctttgccctggcaccactgcaacagatacaactttgtcttcagcagcacaggctgcaaagtttctgtcattgacatgcttccaaaacatttccgaagaagtaatttaaaagtaatatgttttattggagaaggggcgggcaacctcatgctaagagctgttttggaagttggtggaaatataaaattaatatatagatccttaaaagatcctgatgatcatcatgttcctgtagaatttctaagattaaaaccttgttatccttatattgatactggtggcagtttatctttggcttcaacagatgccaccaacaaggcccactgggattatttacatcttcactggacagatcctttaaatttaatagtatgtgatgcagaaataagtggtgtgaagcactggctaaaaattcttcacaggtggtatgagcacatgacttcctgcaagcactgtttaaaatcagaacatgataaatatttaataataaaatatcatgctcaagatgatttaatagatcttcctcatggtgtcaggctactaaaatgtaacatctgcctgggctccaaactaagtggcagtgagagctacctgctcattggtcttggtctttcaaataaacttcctgtctacagtgaagttcttcattcaaaacttcttttggcagaatgtcatcagtttcatcatccaaaatatttggatgtttctggaataaatacaaatataaaatccttaataccaatgttggattatccaataacttacaacaagatcaccactttgctagaaagtgtgcgggagctttcttcaaataaaaacaagaacaccatgtggattggaagaaatcctgtctaccataataaatggctaaagaggaaatatttcaacattttaaaatggctaaaatactgtatagaacttcctgccttcaggatggattataattcatttgagagaatagaaatgctttatccaaatttaagagatttggtagattctgtttctacttcagagctgaagaaagtaataaaagtaacaggcatcctcttcaggagcaacaccatgtgaattaatatgccaatgctaacatgtcatccccactactttttttgttcaatcactctcagtctagacatgtgagaagatcccaaacccaactgcacccctcccactcgaaatcagttgtagcctcagcagctccatctgccatgatctctgaccagcagcaaatgtattattattttaatttgtctatagttaacaaaaaattgatatctcacaggttgtaaacatagttcttttataattattgttagttaaactattgtgtttgacttcctttgggtatttttttcccgtgggtcggcatggcatctccacctcctcgcggtccgacctgggcatccgaaggaggacgcacgtccactcggatggctaagggagagcctgcagtagcataaccccttggggcctctaaacgggtcttgaggggttttttgctgaaaggaggaactatatacgcgtcgacgggcccgcgctcactggccgtcgttttacaacgtcgtgactgggaaaaccctggcgttacccaacttaatcgccttgcagcacatccccctttcgccagctggcgtaatagcgaagaggcccgcaccgatcgcccttcccaacagttgcgcagcctgaatggcgaatgggacgcgccctgtagcggcgcattaagcgcggcgggtgtggtggttacgcgcagcgtgaccgctacacttgccagcgccctagcgcccgctcctttcgctttcttcccttcctttctcgccacgttcgccggctttccccgtcaagctctaaatcgggggctccctttagggttccgatttagtgctttacggcacctcgaccccaaaaaacttgattagggtgatggttcacgtagtgggccatcgccctgatagacggtttttcgccctttgacgttggagtccacgttctttaatagtggactcttgttccaaactggaacaacactcaaccctatctcggtctattcttttgatttataagggattttgccgatttcggcctattggttaaaaaatgagctgatttaacaaaaatttaacgcgaattttaacaaaatattaacgcttacaatttaggtggcacttttcggggaaatgtgcgcggaacccctatttgtttatttttctaaatacattcaaatatgtatccgctcatgagacaataaccctgataaatgcttcaataatattgaaaaaggaagagtatgagtattcaacatttccgtgtcgcccttattcccttttttgcggcattttgccttcctgtttttgctcacccagaaacgctggtgaaagtaaaagatgctgaagatcagttgggtgcacgagtgggttacatcgaactggatctcaacagcggtaagatccttgagagttttcgccccgaagaacgttttccaatgatgagcacttttaaagttctgctatgtggcgcggtattatcccgtattgacgccgggcaagagcaactcggtcgccgcatacactattctcagaatgacttggttgagtactcaccagtcacagaaaagcatcttacggatggcatgacagtaagagaattatgcagtgctgccataaccatgagtgataacactgcggccaacttacttctgacaacgatcggaggaccgaaggagctaaccgcttttttgcacaacatgggggatcatgtaactcgccttgatcgttgggaaccggagctgaatgaagccataccaaacgacgagcgtgacaccacgatgcctgtagcaatggcaacaacgttgcgcaaactattaactggcgaactacttactctagcttcccggcaacaattaatagactggatggaggcggataaagttgcaggaccacttctgcgctcggcccttccggctggctggtttattgctgataaatctggagccggtgagcgtgggtctcgcggtatcattgcagcactggggccagatggtaagccctcccgtatcgtagttatctacacgacggggagtcaggcaactatggatgaacgaaatagacagatcgctgagataggtgcctcactgattaagcattggtaactgtcagaccaagtttactcatatatactttagattgatttaaaacttcatttttaatttaaaaggatctaggtgaagatcctttttgataatctcatgaccaaaatcccttaacgtgagttttcgttccactgagcgtcagaccccgtagaaaagatcaaaggatcttcttgagatcctttttttctgcgcgtaatctgctgcttgcaaacaaaaaaaccaccgctaccagcggtggtttgtttgccggatcaagagctaccaactctttttccgaaggtaactggcttcagcagagcgcagataccaaatactgtccttctagtgtagccgtagttaggccaccacttcaagaactctgtagcaccgcctacatacctcgctctgctaatcctgttaccagtggctgctgccagtggcgataagtcgtgtcttaccgggttggactcaagacgatagttaccggataaggcgcagcggtcgggctgaacggggggttcgtgcacacagcccagcttggagcgaacgacctacaccgaactgagatacctacagcgtgagctatgagaaagcgccacgcttcccgaagggagaaaggcggacaggtatccggtaagcggcagggtcggaacaggagagcgcacgagggagcttccagggggaaacgcctggtatctttatagtcctgtcgggtttcgccacctctgacttgagcgtcgatttttgtgatgctcgtcaggggggcggagcctatggaaaaacgccagcaacgcggcctttttacggttcctggccttttgctggccttttgctcacatgttctttcctgcgttatcccctgattctgtggataaccgtattaccgcctttgagtgagctgataccgctcgccgcagccgaacgaccgagcgcagcgagtcagtgagcgaggaagcggaagagcgcccaatacgcaaaccgcctctccccgcgcgttggccgattcattaatgcagctggcacgacaggtttcccgactggaaagcgggcagtgagcgcaacgcaattaatgtgagttagctcactcattaggcaccccaggctttacactttatgcttccggctcgtatgttgtgtggaattgtgagcggataacaatttcacacaggaaacagctatgaccatgattacgccaagcgcgcccgggtaatacgactcactataggg

SEQ ID NO: 19 - DNA, 18758 bp, synthetic construct
  source 1..18758: mol_type = other DNA
acgcgaaaaaatgcataacaaaactatcaacctgaaaaaagttaggacaagtgaagattgctagtcccaaagaccagaatcatgggctgtaatgtgatgatggagcttgattatggtggacgagctgcatggctggcattccacataaccaactttgataggtcagatttggaaactatcctaagaggtgctagggtgtgcaatacatggcaagatcagagactctccgtgtaccttgtgggaagggattgcaatttgttaagaccatttgtgcaagctgccaaatttatccataatactaggagaggccaaacattaacacattggttcacaaaaaatatcgtgtttagttctacagggcaagagacagagcctcccattgaccccacatgtgagctgttggtagagctgatcagtggttaagatgacagcacattatgtagttaattaaaacaaagggtaggacaagtcctaatgtccacagctatgaacaagttcactcagaccatctctaaacctgccactatcttgaatatttcagacagtgaagagtcgggcgatgaggcaggggtgggcaaggtgtcccgtaccacacagagctcagagaggtggcttgatttgctcattgaaaagttccagccgagcctacaaaacatcactagatacatcaactggaacttcatcaggatctgcaatgataggcttaaaaaagaaaaaatggggtacattgaggccaagcaatatgtggaagacatggcttggatggtgatagcatctgaggcagacagcattgagtggaagtgcataaggaggcaggagaaagtgactggggtgaaatacccaaagttcttctttgtacaacacaaagaggactggattgagtgcacaggatgcattccgtacccaggccatgacttgatctatgatgaggatgatgatgactgagctgactcagatcactccaaccagcagagagatccaccacctatagcaagtgatgtagtatttagtctatgattagttatagaaaaacattaggataaatacacatcctaggccgggccaaaatgtctctagacagattgaagctcaatgatgtctcaaacaaggatagcctgctgtccaactgcaaatacagtgttaccagatccacaggcgatgtaaccagtgtgtctggtcatgctatgcagaaagcccttgcaaggacactcggcatgttcttacttactgccttcaaccgttgcgaagaagtggcagaaatagggctccaatatgccatgtccttgctaggcagagatgatagcatcaagatattaagagaagccggctacaatgtaaaatgtgtggacacacagctcaaggactttacaatcaaattacaaggaaaggaatacaaaatacaagtcctagatatagtgggaatagatgcagccaatttagctgatctagagatacaagccagaggagtggtagcaaaagaactcaaaacaggagccaggctacctgacaatcggaggcatgatgcaccagattgtggtgtgatagttctctgtattgcagcattagttgtttccaaattagctgcaggggacaggggaggacttgatgctgtggaaagaagggctttaaatgtgctgaaagccgagaaagccaggtaccccaacatggaggtcaagcagatagctgaaagtttttatgatctgtttgaaaggaagccttattacattgatgtcttcatcacttttggcctggcccagtctagtgtcaagggaggcagcaaagttgaggggctgttttcaggtctcttcatgaatgcatacggggcaggacaagttatgctgaggtggggtttactggcaaaatctgtcaagaacatcatgctaggccatgctagtgtacaagctgagatggaacaggtggttgaggtttacgaatatgctcagaagcaaggaggggaggcaggattctatcacatcagaaataatccaaaagcttcacttctctctttgaccaattgtcctaatttcaccagtgttgtgcttggcaatgctgcaggtttaggcatcatagggtcatataagggtgctcctaggaatagagaactctttgatgctgccaaagattatgcagaaagattaaaggacaacaatgtaattaactacagtgcattaaacttgactgcagaagaaagagagctgatcagccagcagctgaacattgttgatgacactcctgatgatgatatttaattaaaactggaaaatgtaggataaatagccgccaccatgtttgtttttcttgttttattgccactagtctctagtcagtgtgttaatcttacaaccagaactcaattaccccctgcatacactaattctttcacacgtggtgtttattaccctgacaaagttttcagatcctcagttttacattcaactcaggacttgttcttacctttcttttccaatgttacttggttccatgctatacatgtctctgggaccaatggtactaagaggtttgataaccctgtcctaccatttaatgatggtgtttattttgcttccactgagaagtctaacataataagaggctggatttttggtactactttagattcgaagacccagtccctacttattgttaataacgctactaatgttgttattaaagtctgtgaatttcaattttgtaatgatccatttttgggtgtttattaccacaaaaacaacaaaagttggatggaaagtgagttcagagtttattctagtgcgaataattgcacttttgaatatgtctctcagccttttcttatggaccttgaaggaaaacagggtaatttcaaaaatcttagggaatttgtgtttaagaatattgatggttattttaaaatatattctaagcacacgcctattaatttagtgcgtgatctccctcagggtttttcggctttagaaccattggtagatttgccaataggtattaacatcactaggtttcaaactttacttgctttacatagaagttatttgactcctggtgattcttcttcaggttggacagctggtgctgcagcttattatgtgggttatcttcaacctaggacttttctattaaaatataatgaaaatggaaccattacagatgctgtagactgtgcacttgaccctctctcagaaacaaagtgtacgttgaaatccttcactgtagaaaaaggaatctatcaaacttctaactttagagtccaaccaacagaatctattgttagatttcctaatattacaaacttgtgcccttttggtgaagtttttaacgccaccagatttgcatctgtttatgcttggaacaggaagagaatcagcaactgtgttgctgattattctgtcctatataattccgcatcattttccacttttaagtgttatggagtgtctcctactaaattaaatgatctctgctttactaatgtctatgcagattcatttgtaattagaggtgatgaagtcagacaaatcgctccagggcaaactggaaagattgctgattataattataaattaccagatgattttacaggctgcgttatagcttggaattctaacaatcttgattctaaggttggtggtaattataattacctgtatagattgtttaggaagtctaatctcaaaccttttgagagagatatttcaactgaaatctatcaggccggtagcacaccttgtaatggtgttgaaggttttaattgttactttcctttacaatcatatggtttccaacccactaatggtgttggttaccaaccatacagagtagtagtactttcttttgaacttctacatgcaccagcaactgtttgtggacctaaaaagtctactaatttggttaaaaacaaatgtgtcaatttcaacttcaatggtttaacaggcacaggtgttcttactgagtctaacaaaaagtttctgcctttccaacaatttggcagagacattgctgacactactgatgctgtccgtgatccacagacacttgagattcttgacattacaccatgttcttttggtggtgtcagtgttataacaccaggaacaaatacttctaaccaggttgctgttctttatcaggatgttaactgcacagaagtccctgttgctattcatgcagatcaacttactcctacttggcgtgtttattctacaggttctaatgtttttcaaacacgtgcaggctgtttaataggggctgaacatgtcaacaactcatatgagtgtgacatacccattggtgcaggtatatgcgctagttatcagactcagactaattctcctgggtctgcatccagtgtagctagtcaatccatcattgcctacactatgtcacttggtgcagaaaattcagttgcttactctaataactctattgccatacccacaaattttactattagtgttaccacagaaattctaccagtgtctatgaccaagacatcagtagattgtacaatgtacatttgtggtgattcaactgaatgcagcaatcttttgttgcaatatggcagtttttgtacacaattaaaccgtgctttaactggaatagctgttgaacaagacaaaaacacccaagaagtttttgcacaagtcaaacaaatttacaaaacaccaccaattaaagattttggtggttttaatttttcacaaatattaccagatccatcaaaaccaagcaagaggtcatttattgaagatctacttttcaacaaagtgacacttgcagatgctggcttcatcaaacaatatggtgattgccttggtgatattgctgctagagacctcatttgtgcacaaaagtttaacggccttactgttttgccacctttgctcacagatgaaatgattgctcaatacacttctgcactgttagcgggtacaatcacttctggttggacctttggtgcaggtgctgcattacaaataccatttgctatgcaaatggcttataggtttaatggtattggagttacacagaatgttctctatgagaaccaaaaattgattgccaaccaatttaatagtgctattggcaaaattcaagactcactttcttccacagcaagtgcacttggaaaacttcaagatgtggtcaaccaaaatgcacaagctttaaacacgcttgttaaacaacttagctccaattttggtgcaatttcaagtgttttaaatgatatcctttcacgtcttgaccctccagaggctgaagtgcaaattgataggttgatcacaggcagacttcaaagtttgcagacatatgtgactcaacaattaattagagctgcagaaatcagagcttctgctaatcttgctgctactaaaatgtcagagtgtgtacttggacaatcaaaaagagttgatttttgtggaaagggctatcatcttatgtccttccctcagtcagcacctcatggtgtagtcttcttgcatgtgacttatgtccctgcacaagaaaagaacttcacaactgctcctgccatttgtcatgatggaaaagcacactttcctcgtgaaggtgtctttgtttcaaatggcacacactggtttgtaacacaaaggaatttttatgaaccacaaatcattactacagacaacacatttgtgtctggtaactgtgatgttgtaataggaattgtcaacaacacagtttatgatcctttgcaacctgaattagactcattcaaggaggagttggataagtattttaagaatcatacatcaccagatgttgatttaggtgacatctctggcattaatgcttcagttgtaaacattcaaaaagaaattgaccgcctcaatgaggttgccaagaatttaaatgaatctctcatcgatctccaagaacttggaaagtatgagcagtacatcaagtggccatggtacatttggctaggttttatagctggcttgattgccatagtaatggtgacaattatgctttgctgtatgaccagttgctgtagttgtctcaagggctgttgttcttgtggatcctgctgcaaatttgatgaagacgactctgagccagtgctcaaaggagtcaaattacattacacataatgatatttaattaaaactggaaaatgtaggataaatatggagaaattcgcccccgaatttgttggcgaggatgctaacaagaaggcagaggagtttctcaaacatagatccttcccttcggaaaaaccactagctggtataccgaacactgccactcatgtcaccaaatataacatgccccctatattgcgtagctcattcaaactcccttccccgagagttgctgcaaatcttactgaaccctctgctccccctaccactccaccacccacacctccccagaacaaggaagagcagcccaaagagtctgatgttgacattgagactatgcatgtctgtaaggttcctgacaatccggaacacagcaagaagccatgctgctcagatgataccgatactaagaaaactaggaagccgatggtcacctttgtggaacccgaggagaaatttgtcggattgggagctagcttgtacagggagaccatgcagacctttgctgctgatggttatgatgaagaaagcaacctatcgtttgaggagactaaccaagagccgggttcttcatctgtagaacaaagactagatagaatagaggagaaattgtcctacataataggccttttaaacaccataatggtagcgactgctggacctaccactgctagagatgagattagagatgcccttataggcactagagaagaacttattgagatgatcaagtctgacatcttgactgtcaatgacagaatagtggccatggagaagctcagagatgaggaatgctccagagctgacactgatgatggatcagcctgttatttaacagacagagcaaggatactagataagatagtgtccagcaatgctgaagaggctaaggaagatttggatgttgatgacatcatgggcattaatttttagttaattaaaataacaacaggacaaataatggaggcctacttggtagagatgtaccatggtgtcccatatacagctgcagtacagctaaacttggttgaaaaacattcagccaacatatcactaactgtgtggataccgatgtttcaaacatctctaccaaagaactccgttatggacctgctacatgatgttacagtcatttgtacacagatatcaacagtgcatggtcccatgatcaaggtagatctgagctcttccaatgcaggtttagctaccatgccaaggcaattcttgataaatgctatcatagctttggatgactggggcaacatggattacgaagtgcctgttgcttttgataaaaagagcttctgtgtgacaattcttaagcctaaaaacatgctttacactgtacccagcattactcccactaatcgacctactcatgagctgatagctgtctgctctttccataacagggtaacattaaagtcattcaatatacctgtcttcatcagagcactgtctatcagacagcaggaccttgatagtgtggagcaggctataagctccgatgtggaccatgctataacaacagctagggtggctccctatgcagggcttacacttgtgatcaacatcacatccaccaaaggagcattcaaactgctaaaggcaggtagtcagattcttgcagaactgggtccctatctgacgcaggtgagcctacatgatgtgattatgaactggaaacatacaggcacttcctacatactcaagagctcctcaacaagtggatgaaaaagagaaagtcaccattgatcagctcaatccacaactacaaccccacgatttcacacagcacaacaaccaccgccaccaacatccacatgacaaccacacatacacacccacatacatatatacacatatcttagttaaataaaatcaggataaataatggatcctaacatgacctcacaccagatcaccctcgagatcaacatgaccagcagccgtattggcacatacactacaccagccccaacagctcttctccttgcatgtgccgtcatcaacacagtgtgtgcgctgataatggcctgcagcagtagaagcactgccacatcaggcattgtcagcagccaatgcacagttcatcccaatcaccctccaccaagttatggcgtcaatgtaactggtctgccgggtaacctatactcaaggaacactacataacattataaataacagaaattatccttcaataaaccccaggccagacagctttaccctgctagacgattcaatcagcccttgcagtatgtcgtctagttaacaaaaaaccggtaggataagtactatcctattggaaccaaacgagacctgtagagcagctcacacaagagaaccacaagctgacttcacctagtatgggaaggaacttagaagtgagtggcagcattaccaatttgaactttgagagaactcagcatcctgacacatttaggactgttgtaaaagtgaaccaaatgtgtaagcttattgcaggtgtgctcacaagtgctgctgtggcagtttgtgtgggggtcataatgtattctgttttcacatcaaaccacaaggccaactccacgcagaatgccacgacccggaacagcacatccacccctccccaaccaaccgccggtctgcccaccacagagcaagggaccatccccagattcaccaaaccccccaccaaaaccgccacccaccatgagatcacagagcccgtcaaaatggcaacaccttcagaggatccctaccaatgctccagcaatggttatttggaccgacctgatttacctgaaaatttcaaactcgtattggatgttatatgcaagcctccaggtcctgaacatcacaacaccagctgttatgagaaacgtgaaatcaacccaggaagtgtttgccctgatcttgtaacaatgaaggcaaacatgggcttaaacaatggtggtggggaggatgctgcaccttatatagaggttaccaccctttctacgtactccaacaaaagggcaatgtgtgtccacaatgggtgtgatcaaggcttctgtttcttcctttctggtttaagcactgatcaggagagagctgtgctagagcttggaggtcaacaggctatcatggagttgcattatgattcctactggaaacactattggagtaactctaattgtgttgttcccagaacaaactgcaacctgacagaccaaactgagattttgtttcctaggtttaacaacaagaatcagtctcagtgtaccacctgtgcagattcagctggcctagataacaaattttatctcacatgtgatgggcttttaagaaccctccctctagttggactacccagcctaagtcctcaggcttacaaagctgtacccacacaaactacaggcaccaccacggcaccaacatcagagacgaggcacccaacccctgcacccaggaggtccaaacctctcagtcggaagaagagagctttatgtggtgtagactcaagcagagaacccaaaccaacaatgccttactggtgtcctatgctccaattatttccaaggaggtctaattcttaagtgacctattcctgaattaacttcagaataagtaccaaccttatcagtagttaatgaaaactaagctttgatataataggacaaatatgattcctggcaggatctttctagtccttctggtgatcttcaacaccaagccaattcacccaaatacattaacagaaaaattctatgagtccacatgtagtgttgagactgcaggttataagagtgcccttagaacaggttggcatatgacagttatgtcaattaagttgtctcaaataaatattgagtcatgcaagagcagcaactcgttattggctcatgagcttgcaatctatagtagtgcagtggatgaattgagaacgttatcatccaatgccttgaagtccaaaaggaagaagaggttcctcggtttgattcttggtctcggagctgcagtcactgccggggtggctttagccaagacagtgcaacttgaaagtgagattgcattgattagagatgcagtgagaaatacaaatgaggctgttgttagcctaaccaacggcatgtcagtgttggctaaagtggtggatgatttgaaaaacttcatatctaaagaattactcccaaaaataaaccgagtctcttgtgatgtgcacgacatcactgccgtcattagattccaacagctcaacaaaagacttttggaagtatctcgtgaattttcatctaatgcaggattaacacacactgtttcatcttttatgttaacagaccgggaactcacctccattgtaggcggcatggctgtttcagcaggccaaaaagagataatgctatctagcaaagctataatgagaagaaatgggttagcaatattaagttcagtcaacgctgacacactggtttatgtaatacaactcccattatttggtgttatggacacagattgttgggtaataagaagttctatagactgtcataacatagcagacaagtatgcttgtttggctagagctgataatggctggtattgtcacaatgctggctcattatcatacttcccgtcgccaacggattgtgagatccacaatgggtatgctttctgtgacactctaaaaagtctaactgtacctgtaacatcacgagaatgcaactcaaacatgtataccactaactacgattgtaagatttccacaagtaaaacttatgtgagtacagcggtactgactacaatgggttgcttggtatcttgttatggtcataacagttgcacagtcatcaataatgacaaaggtataataaggactctgccagatggttgccactacatctccaacaaaggtgtggacagggttcaagtaggtaacactgtttactatcttagcaaagaagttggcaagtcaattgttgtcagaggggaaccattggtcttgaaatatgaccctttgagtttccctgacgataaatttgatgttgctataagagatgtggagcatagcatcaatcagacacgcacattcttgaaggcctctgatcagttattggacttaagtgaaaacagagagaataaaaatttaaacaagtcatatatactaacaactctgctcttcgttgtaatgcttattataataatggctgtcatagggttcattctgtataaggtattgaaaatgatcagagacaacaagttgaaatccaaaagtacacctggcctcacagttttatcatgacaattgtaccaaaccataattgagttagttaattaaaaacttaggataagtgacaatccagacccaacacctctttcaactctcaaggataaggtaggatgagtgtgagaccttgcaaatttgaggttcaagggttttgttccagagggaggaattgcaagtatagtcataaatattgggaatggcctttgaaaactcttatgctcaggcagaactacatgcttaataggatttataggttcctcgacaccaacacagatgcaatgtcagatgtcagcggatttgatgcaccacaaaggactgctgagtatgccttgggaaccataggtgtgctgaaaagttacctggaaaaaactaacaacatcactaaatcaatagcttgtggcagtttgatcactgtattgcagaacttggatgttggtctagtaatacaagcaagagatagcaacactgaggacaccaattacttgagaagttgcaacactatactgtcttatatagacaagatacacaagaagagacaaattattcacattctcaaaagactgccagtaggagtactatgcaatctgatccaatctgtcatctccatcgaggagaagataaattcttctatgaaaacagaatgataaggctgcctaaatactatccagccatactgcataagatgtatattattagagtaaatagaaacctcacttacgatgggtctggaccatccacaataatagatgcaggaaagtctgtggtgtggaatcgtgttgatgtgatagcttgtgtgaaagaggccttgtgctgcatagaattcagctggaataaccaagtgatcatagactttgattatagccaggccagatgatgtggactgtattcctttttttgtcagtaatcagttattaacccaaaattgttaattatgtagactttaagttaactaacttcatgttaattcaatagttatataaaaaaatattcgaattaggatcaatatggatcctattgatgaacaagaagttaatgtgtacttgccggatagctacttaaagggtgttatatcttttagtgaaactaatgctcttggcagctgtatcattggtagacctttcttgaaggatgactttactgccactacttcaatccgtaaccccctaattgaacataaaagaataagggacactaaattagtaaaaaatattgtttcaaaccctcaatataggttagtggagcctctccaaatgcagcatgagctcttgagtgtactatcgcccaatttcatattgcacactgccaacttaaggaaaattatacaaagaagtgttgacataacagataaaaagttgaaccccattttgcacattttgaatcttaattctcctaaccaagagggtaaggtgtcggaacggctaactaggctaattaagaaacatctctctcacatacctaattgggtaagcagctggtacaatatatgggtcaatcttaacaacttactgcaggagtaccgttcaaaggaagttatagaccataactgtgttctgactaggcaattgtctggaagtttcatacatgtggtcatgagtcaatatggagttgtgataattagcaaaaaaagtaaaagatatacaatgtgtacttataaccaattcctaacctggaaggaccttgccttgagcagatttaatgccaattatgtggtctggctaagtaatgtgttaaacacactcaacgaggggttgggattaaggtgtagattaaaaggtcatctgctcagtaagttgtacatttccactgacatctttttatcttcaacatctaatgaattttataatgtggtcaaggaatttgagggcttcatcatgtcactgatattgaaacaaactgaggaagccttatttagcacaaggttttataataacatgttgaacaacttaattgatgccattgatagggctcgactagagtatctggcccgctgtgccaattcagctgccaggattaatttacctagtacagatgttatgatagcatcattgggtgatatcttatctttgataaacgttttaggtgaatccaaccttaacaacttaagtgagttatattttatcttcaggatatttggtcaccctatggttgatgagaggaaggccatggatgcagtcagagataactgttgtgaaacaaagtttctgacggctaagaaccttgcatcgttaagaggagcatatgtttatagaattatcaaaggattcgtagcaaattataacaggtggccttacataaaaactagagtttgccttacaccaacatggattaactatcttgacaccaattcatgtccctcattattagagatgacagaagatgattttattgtgttagctggagtgcactttataagagaattccacatcccaaagctaactgatctggagattatattaaatgacaaggccatatctcctccaaaatcactcatttggtcatgctttccaaaaaactacatacctcaggttatacaagatgagtatgcccggaggtattgtagagctaaagcacctttgaagacaagacgtgtcttggagttctacttacaggacaaggatttcaagttggatcagctccatagagtagtagtgaaccaggactaccttaatgataaagaacatataatttctttaacaggaaaagaaagagagttgggtgttggtaggatgtttgccatgcaacctgggaagcagaggcaagtccaaattttagcagagaagctgttggctgataacatcctgcaattctttccggagacactgactagatacggtgatttggagctgcaaaagatactagagttaaaagctggactttcaaataaaaatgacagatctaaagactcctacaataattatataagtaggtgctcattaattactgatttaagtaaatttaaccaagcttttaggtacgagtcatcctgtgtgtgtagtgatcttttagatgagctacatgggactcaaagcttattctcttggctgcatttaacagtaccactgactactataatgtgtacatataggcatgcgccgccggacactggaaacaactataatgtagatgatattgctgagcagagtggactctaccgctaccacatgggcgggattgagggctggtgccagaagctctggacaacagaggccattgctttgctagatactgtagctgtgaagggccgtttccagctaacttcattaataaatggcgacaaccaaagtattgatatttcaaaaccaacaaggctggggaccaggactcaaagtgaagcagattatgatttggcaataaattctttaagattaatatcagcagcttataaaggcattggacataaattaaaagaaggtgagacctacttgtcacgtgacatgcagttcatgagtaaaacaatacaacatgaaggggtctactacccggcctccatcaagaaaatattaagagttggtccctggatcaacacaatattagatgatataaaaacttcaacagaaagtattggttctctaactcaagaactagaatataaaggtgaaagtttaatgagcagcctgctgctgaggaacttctggctctacagattatattcagtggatttaaaagatcattctttgtgtggaaagcagctctacagatccttaataaaagtgttaaaacatttgaagaggtgcttcaacctggagaaccttggggaatgtttggaattatttttaaatgtgcccatgcagtttggaggtgctgacccaaatgtcatctacaggagcttctacagaagaactccagattttctaacagaaagtataactcatctcatcctcattttaaaacattttagaagagatttggaattcaacaaagataatgtctccaaagctgttctttctttgctagagttcaccaagaatgattctgcagaatttgtaactttgatgagagatcctcaagcaattggtagtgagaggcaggccaagatcacttcagacatcaacagaacagctgtaacttcagtgttatcaaatgctccaaatgaaatatttagaacttcagctcttcattacagcagcacagaaaatgaattaaatggaatagcaagtggagtttctcctgtttatcctcatggtcttcgagttttatatgaaagtttacctttttataaagcagagaagattgtcaacatggtttctgggaccaagtccatcaccaacatactggagaagacatcagccatctcctacacagatataattcgagccaccaacatgatggtggagaacctcactttgctaacaagaataatgaaaccaggtgctgacacatctttggatcctgacacaatagtaataacaatattatcaaaaataataagagataaatcctgggatgttggtgatataattggtgtcacttccccatctcctgtctcctgcttcaaggtggtctacacatcaactctacaaaataattcagtagtaatagaaagatacacaacagacacctacacaagaggtaagagaggccccaccaagccctgggtgggcagcagcacacaggagaagaagtccatgcctgtctacaacagacaagttttaacaagaggacaaagagatcaaatagaaaatatagcaaagctggagtgggtgttttcttcagtagcaaatattgattctttgctaaatgagctcagcaccatgactttgggtctttctctaaggaaatgtagacaactttttccaacatatttaagtttaaacttcctgcacaggctttctgtcagcagcaggcccagagaatatccttcttctcttcctgcctacaggacaacaaattttcattttgatactggaccaataaataaagtgttaacagaaagatttggagatgaagatataaatttggtatttcaaaatgcaatatcatatggtctttccaccatgtctttggtggagcagtttactggtgtctgtccaaataaagttttgctggtgcccaagctacaagaaatacaactaatgaaagttccaatatttcaaggtggcttcaacctacaaagtataattccaataataaggcagcagcacatgttcctgcccaaccacatcactccagcccagtatattgaattatttctttcttcaaaacaatttcattcaagaataaatttaaaacacaacaacagatttaaacttgttttacaaaaagattattttaatggggagaacatgatagaaactttgtccacctgtttggcaggccactggatcatcattttgatgctaatgaaggagagtcaggggatatttgacaaggagtggtatgatggttttgtaacagaccacatgttcctggacctgcagctcttcctctcctccttcaagacatttctaactgtcttcaactttgcttatttaaaagttggttcaaatatagaagaaataacaggaaatcaagccaacctgctggagctgctggacctgggctactggaagaacatgtataaagtattttcagagaccaaggtgcggctggctttgctaaaacaagatttatcatttaattctgtgaagaacagcagcagcttccggcactggtttataaattctctacaagaagtacaatgtacttctgtgccttgggtggtaaatgtaacaagaaatccaactcatttaaaaggtgttctacagtacatgaagatgatagaaagtggcatgattcaaggttattcagcaaatatttcttcagttttaagtatcccatataattatccagacatggcgcacatgatgacaaaaataataagaaatcgaggccacatgtcctatgattatccaaagatgaagaaaagtttaactttctccatgacagacatgagtgacagctacatgctcaacctcttccccaaagtagaatgttcttacatgagtggttatttggataaactagatgatactctacaacttctaaagaaacctcctgttggaagaaaagttccttctgtggctttgccctggcaccactgcaacagatacaactttgtcttcagcagcacaggctgcaaagtttctgtcattgacatgcttccaaaacatttccgaagaagtaatttaaaagtaatatgttttattggagaaggggcgggcaacctcatgctaagagctgttttggaagttggtggaaatataaaattaatatatagatccttaaaagatcctgatgatcatcatgttcctgtagaatttctaagattaaaaccttgttatccttatattgatactggtggcagtttatctttggcttcaacagatgccaccaacaaggcccactgggattatttacatcttcactggacagatcctttaaatttaatagtatgtgatgcagaaataagtggtgtgaagcactggctaaaaattcttcacaggtggtatgagcacatgacttcctgcaagcactgtttaaaatcagaacatgataaatatttaataataaaatatcatgctcaagatgatttaatagatcttcctcatggtgtcaggctactaaaatgtaacatctgcctgggctccaaactaagtggcagtgagagctacctgctcattggtcttggtctttcaaataaacttcctgtctacagtgaagttcttcattcaaaacttcttttggcagaatgtcatcagtttcatcatccaaaatatttggatgtttctggaataaatacaaatataaaatccttaataccaatgttggattatccaataacttacaacaagatcaccactttgctagaaagtgtgcgggagctttcttcaaataaaaacaagaacaccatgtggattggaagaaatcctgtctaccataataaatggctaaagaggaaatatttcaacattttaaaatggctaaaatactgtatagaacttcctgccttcaggatggattataattcatttgagagaatagaaatgctttatccaaatttaagagatttggtagattctgtttctacttcagagctgaagaaagtaataaaagtaacaggcatcctcttcaggagcaacaccatgtgaattaatatgccaatgctaacatgtcatccccactactttttttgttcaatcactctcagtctagacatgtgagaagatcccaaacccaactgcacccctcccactcgaaatcagttgtagcctcagcagctccatctgccatgatctctgaccagcagcaaatgtattattattttaatttgtctatagttaacaaaaaattgatatctcacaggttgtaaacatagttcttttataattattgttagttaaactattgtgtttgacttcctttgggtatttttttcccgt

SEQ ID NO: 20 - DNA, 21750 bp, synthetic construct
  source 1..21750: mol_type = other DNA
acgcgaaaaaatgcataacaaaactatcaacctgaaaaaagttaggacaagtgaagattgctagtcccaaagaccagaatcatgggctgtaatgtgatgatggagcttgattatggtggacgagctgcatggctggcattccacataaccaactttgataggtcagatttggaaactatcctaagaggtgctagggtgtgcaatacatggcaagatcagagactctccgtgtaccttgtgggaagggattgcaatttgttaagaccatttgtgcaagctgccaaatttatccataatactaggagaggccaaacattaacacattggttcacaaaaaatatcgtgtttagttctacagggcaagagacagagcctcccattgaccccacatgtgagctgttggtagagctgatcagtggttaagatgacagcacattatgtagttaattaaaacaaagggtaggacaagtcctaatgtccacagctatgaacaagttcactcagaccatctctaaacctgccactatcttgaatatttcagacagtgaagagtcgggcgatgaggcaggggtgggcaaggtgtcccgtaccacacagagctcagagaggtggcttgatttgctcattgaaaagttccagccgagcctacaaaacatcactagatacatcaactggaacttcatcaggatctgcaatgataggcttaaaaaagaaaaaatggggtacattgaggccaagcaatatgtggaagacatggcttggatggtgatagcatctgaggcagacagcattgagtggaagtgcataaggaggcaggagaaagtgactggggtgaaatacccaaagttcttctttgtacaacacaaagaggactggattgagtgcacaggatgcattccgtacccaggccatgacttgatctatgatgaggatgatgatgactgagctgactcagatcactccaaccagcagagagatccaccacctatagcaagtgatgtagtatttagtctatgattagttatagaaaaacattaggataaatacacatcctaggccgggccaaaatgtctctagacagattgaagctcaatgatgtctcaaacaaggatagcctgctgtccaactgcaaatacagtgttaccagatccacaggcgatgtaaccagtgtgtctggtcatgctatgcagaaagcccttgcaaggacactcggcatgttcttacttactgccttcaaccgttgcgaagaagtggcagaaatagggctccaatatgccatgtccttgctaggcagagatgatagcatcaagatattaagagaagccggctacaatgtaaaatgtgtggacacacagctcaaggactttacaatcaaattacaaggaaaggaatacaaaatacaagtcctagatatagtgggaatagatgcagccaatttagctgatctagagatacaagccagaggagtggtagcaaaagaactcaaaacaggagccaggctacctgacaatcggaggcatgatgcaccagattgtggtgtgatagttctctgtattgcagcattagttgtttccaaattagctgcaggggacaggggaggacttgatgctgtggaaagaagggctttaaatgtgctgaaagccgagaaagccaggtaccccaacatggaggtcaagcagatagctgaaagtttttatgatctgtttgaaaggaagccttattacattgatgtcttcatcacttttggcctggcccagtctagtgtcaagggaggcagcaaagttgaggggctgttttcaggtctcttcatgaatgcatacggggcaggacaagttatgctgaggtggggtttactggcaaaatctgtcaagaacatcatgctaggccatgctagtgtacaagctgagatggaacaggtggttgaggtttacgaatatgctcagaagcaaggaggggaggcaggattctatcacatcagaaataatccaaaagcttcacttctctctttgaccaattgtcctaatttcaccagtgttgtgcttggcaatgctgcaggtttaggcatcatagggtcatataagggtgctcctaggaatagagaactctttgatgctgccaaagattatgcagaaagattaaaggacaacaatgtaattaactacagtgcattaaacttgactgcagaagaaagagagctgatcagccagcagctgaacattgttgatgacactcctgatgatgatatttaattaaaactggaaaatgtaggataaatagccgccaccatgtttgtttttcttgttttattgccactagtctctagtcagtgtgttaatcttacaaccagaactcaattaccccctgcatacactaattctttcacacgtggtgtttattaccctgacaaagttttcagatcctcagttttacattcaactcaggacttgttcttacctttcttttccaatgttacttggttccatgctatacatgtctctgggaccaatggtactaagaggtttgataaccctgtcctaccatttaatgatggtgtttattttgcttccactgagaagtctaacataataagaggctggatttttggtactactttagattcgaagacccagtccctacttattgttaataacgctactaatgttgttattaaagtctgtgaatttcaattttgtaatgatccatttttgggtgtttattaccacaaaaacaacaaaagttggatggaaagtgagttcagagtttattctagtgcgaataattgcacttttgaatatgtctctcagccttttcttatggaccttgaaggaaaacagggtaatttcaaaaatcttagggaatttgtgtttaagaatattgatggttattttaaaatatattctaagcacacgcctattaatttagtgcgtgatctccctcagggtttttcggctttagaaccattggtagatttgccaataggtattaacatcactaggtttcaaactttacttgctttacatagaagttatttgactcctggtgattcttcttcaggttggacagctggtgctgcagcttattatgtgggttatcttcaacctaggacttttctattaaaatataatgaaaatggaaccattacagatgctgtagactgtgcacttgaccctctctcagaaacaaagtgtacgttgaaatccttcactgtagaaaaaggaatctatcaaacttctaactttagagtccaaccaacagaatctattgttagatttcctaatattacaaacttgtgcccttttggtgaagtttttaacgccaccagatttgcatctgtttatgcttggaacaggaagagaatcagcaactgtgttgctgattattctgtcctatataattccgcatcattttccacttttaagtgttatggagtgtctcctactaaattaaatgatctctgctttactaatgtctatgcagattcatttgtaattagaggtgatgaagtcagacaaatcgctccagggcaaactggaaagattgctgattataattataaattaccagatgattttacaggctgcgttatagcttggaattctaacaatcttgattctaaggttggtggtaattataattacctgtatagattgtttaggaagtctaatctcaaaccttttgagagagatatttcaactgaaatctatcaggccggtagcacaccttgtaatggtgttgaaggttttaattgttactttcctttacaatcatatggtttccaacccactaatggtgttggttaccaaccatacagagtagtagtactttcttttgaacttctacatgcaccagcaactgtttgtggacctaaaaagtctactaatttggttaaaaacaaatgtgtcaatttcaacttcaatggtttaacaggcacaggtgttcttactgagtctaacaaaaagtttctgcctttccaacaatttggcagagacattgctgacactactgatgctgtccgtgatccacagacacttgagattcttgacattacaccatgttcttttggtggtgtcagtgttataacaccaggaacaaatacttctaaccaggttgctgttctttatcaggatgttaactgcacagaagtccctgttgctattcatgcagatcaacttactcctacttggcgtgtttattctacaggttctaatgtttttcaaacacgtgcaggctgtttaataggggctgaacatgtcaacaactcatatgagtgtgacatacccattggtgcaggtatatgcgctagttatcagactcagactaattctcctgggtctgcatccagtgtagctagtcaatccatcattgcctacactatgtcacttggtgcagaaaattcagttgcttactctaataactctattgccatacccacaaattttactattagtgttaccacagaaattctaccagtgtctatgaccaagacatcagtagattgtacaatgtacatttgtggtgattcaactgaatgcagcaatcttttgttgcaatatggcagtttttgtacacaattaaaccgtgctttaactggaatagctgttgaacaagacaaaaacacccaagaagtttttgcacaagtcaaacaaatttacaaaacaccaccaattaaagattttggtggttttaatttttcacaaatattaccagatccatcaaaaccaagcaagaggtcatttattgaagatctacttttcaacaaagtgacacttgcagatgctggcttcatcaaacaatatggtgattgccttggtgatattgctgctagagacctcatttgtgcacaaaagtttaacggccttactgttttgccacctttgctcacagatgaaatgattgctcaatacacttctgcactgttagcgggtacaatcacttctggttggacctttggtgcaggtgctgcattacaaataccatttgctatgcaaatggcttataggtttaatggtattggagttacacagaatgttctctatgagaaccaaaaattgattgccaaccaatttaatagtgctattggcaaaattcaagactcactttcttccacagcaagtgcacttggaaaacttcaagatgtggtcaaccaaaatgcacaagctttaaacacgcttgttaaacaacttagctccaattttggtgcaatttcaagtgttttaaatgatatcctttcacgtcttgaccctccagaggctgaagtgcaaattgataggttgatcacaggcagacttcaaagtttgcagacatatgtgactcaacaattaattagagctgcagaaatcagagcttctgctaatcttgctgctactaaaatgtcagagtgtgtacttggacaatcaaaaagagttgatttttgtggaaagggctatcatcttatgtccttccctcagtcagcacctcatggtgtagtcttcttgcatgtgacttatgtccctgcacaagaaaagaacttcacaactgctcctgccatttgtcatgatggaaaagcacactttcctcgtgaaggtgtctttgtttcaaatggcacacactggtttgtaacacaaaggaatttttatgaaccacaaatcattactacagacaacacatttgtgtctggtaactgtgatgttgtaataggaattgtcaacaacacagtttatgatcctttgcaacctgaattagactcattcaaggaggagttggataagtattttaagaatcatacatcaccagatgttgatttaggtgacatctctggcattaatgcttcagttgtaaacattcaaaaagaaattgaccgcctcaatgaggttgccaagaatttaaatgaatctctcatcgatctccaagaacttggaaagtatgagcagtacatcaagtggccatggtacatttggctaggttttatagctggcttgattgccatagtaatggtgacaattatgctttgctgtatgaccagttgctgtagttgtctcaagggctgttgttcttgtggatcctgctgcaaatttgatgaagacgactctgagccagtgctcaaaggagtcaaattacattacacataatgatatttaattaaaactggaaaatgtaggataaatatggagaaattcgcccccgaatttgttggcgaggatgctaacaagaaggcagaggagtttctcaaacatagatccttcccttcggaaaaaccactagctggtataccgaacactgccactcatgtcaccaaatataacatgccccctatattgcgtagctcattcaaactcccttccccgagagttgctgcaaatcttactgaaccctctgctccccctaccactccaccacccacacctccccagaacaaggaagagcagcccaaagagtctgatgttgacattgagactatgcatgtctgtaaggttcctgacaatccggaacacagcaagaagccatgctgctcagatgataccgatactaagaaaactaggaagccgatggtcacctttgtggaacccgaggagaaatttgtcggattgggagctagcttgtacagggagaccatgcagacctttgctgctgatggttatgatgaagaaagcaacctatcgtttgaggagactaaccaagagccgggttcttcatctgtagaacaaagactagatagaatagaggagaaattgtcctacataataggccttttaaacaccataatggtagcgactgctggacctaccactgctagagatgagattagagatgcccttataggcactagagaagaacttattgagatgatcaagtctgacatcttgactgtcaatgacagaatagtggccatggagaagctcagagatgaggaatgctccagagctgacactgatgatggatcagcctgttatttaacagacagagcaaggatactagataagatagtgtccagcaatgctgaagaggctaaggaagatttggatgttgatgacatcatgggcattaatttttagttaattaaaataacaacaggacaaataatggaggcctacttggtagagatgtaccatggtgtcccatatacagctgcagtacagctaaacttggttgaaaaacattcagccaacatatcactaactgtgtggataccgatgtttcaaacatctctaccaaagaactccgttatggacctgctacatgatgttacagtcatttgtacacagatatcaacagtgcatggtcccatgatcaaggtagatctgagctcttccaatgcaggtttagctaccatgccaaggcaattcttgataaatgctatcatagctttggatgactggggcaacatggattacgaagtgcctgttgcttttgataaaaagagcttctgtgtgacaattcttaagcctaaaaacatgctttacactgtacccagcattactcccactaatcgacctactcatgagctgatagctgtctgctctttccataacagggtaacattaaagtcattcaatatacctgtcttcatcagagcactgtctatcagacagcaggaccttgatagtgtggagcaggctataagctccgatgtggaccatgctataacaacagctagggtggctccctatgcagggcttacacttgtgatcaacatcacatccaccaaaggagcattcaaactgctaaaggcaggtagtcagattcttgcagaactgggtccctatctgacgcaggtgagcctacatgatgtgattatgaactggaaacatacaggcacttcctacatactcaagagctcctcaacaagtggatgaaaaagagaaagtcaccattgatcagctcaatccacaactacaaccccacgatttcacacagcacaacaaccaccgccaccaacatccacatgacaaccacacatacacacccacatacatatatacacatatcttagttaaataaaatcaggataaataatggatcctaacatgacctcacaccagatcaccctcgagatcaacatgaccagcagccgtattggcacatacactacaccagccccaacagctcttctccttgcatgtgccgtcatcaacacagtgtgtgcgctgataatggcctgcagcagtagaagcactgccacatcaggcattgtcagcagccaatgcacagttcatcccaatcaccctccaccaagttatggcgtcaatgtaactggtctgccgggtaacctatactcaaggaacactacataacattataaataacagaaattatccttcaataaaccccaggccagacagctttaccctgctagacgattcaatcagcccttgcagtatgtcgtctagttaacaaaaaaccggtaggataagtactatcctattggaaccaaacgagacctgtagagcagctcacacaagagaaccacaagctgacttcacctagtatgggaaggaacttagaagtgagtggcagcattaccaatttgaactttgagagaactcagcatcctgacacatttaggactgttgtaaaagtgaaccaaatgtgtaagcttattgcaggtgtgctcacaagtgctgctgtggcagtttgtgtgggggtcataatgtattctgttttcacatcaaaccacaaggccaactccacgcagaatgccacgacccggaacagcacatccacccctccccaaccaaccgccggtctgcccaccacagagcaagggaccatccccagattcaccaaaccccccaccaaaaccgccacccaccatgagatcacagagcccgtcaaaatggcaacaccttcagaggatccctaccaatgctccagcaatggttatttggaccgacctgatttacctgaaaatttcaaactcgtattggatgttatatgcaagcctccaggtcctgaacatcacaacaccagctgttatgagaaacgtgaaatcaacccaggaagtgtttgccctgatcttgtaacaatgaaggcaaacatgggcttaaacaatggtggtggggaggatgctgcaccttatatagaggttaccaccctttctacgtactccaacaaaagggcaatgtgtgtccacaatgggtgtgatcaaggcttctgtttcttcctttctggtttaagcactgatcaggagagagctgtgctagagcttggaggtcaacaggctatcatggagttgcattatgattcctactggaaacactattggagtaactctaattgtgttgttcccagaacaaactgcaacctgacagaccaaactgagattttgtttcctaggtttaacaacaagaatcagtctcagtgtaccacctgtgcagattcagctggcctagataacaaattttatctcacatgtgatgggcttttaagaaccctccctctagttggactacccagcctaagtcctcaggcttacaaagctgtacccacacaaactacaggcaccaccacggcaccaacatcagagacgaggcacccaacccctgcacccaggaggtccaaacctctcagtcggaagaagagagctttatgtggtgtagactcaagcagagaacccaaaccaacaatgccttactggtgtcctatgctccaattatttccaaggaggtctaattcttaagtgacctattcctgaattaacttcagaataagtaccaaccttatcagtagttaatgaaaactaagctttgatataataggacaaatatgattcctggcaggatctttctagtccttctggtgatcttcaacaccaagccaattcacccaaatacattaacagaaaaattctatgagtccacatgtagtgttgagactgcaggttataagagtgcccttagaacaggttggcatatgacagttatgtcaattaagttgtctcaaataaatattgagtcatgcaagagcagcaactcgttattggctcatgagcttgcaatctatagtagtgcagtggatgaattgagaacgttatcatccaatgccttgaagtccaaaaggaagaagaggttcctcggtttgattcttggtctcggagctgcagtcactgccggggtggctttagccaagacagtgcaacttgaaagtgagattgcattgattagagatgcagtgagaaatacaaatgaggctgttgttagcctaaccaacggcatgtcagtgttggctaaagtggtggatgatttgaaaaacttcatatctaaagaattactcccaaaaataaaccgagtctcttgtgatgtgcacgacatcactgccgtcattagattccaacagctcaacaaaagacttttggaagtatctcgtgaattttcatctaatgcaggattaacacacactgtttcatcttttatgttaacagaccgggaactcacctccattgtaggcggcatggctgtttcagcaggccaaaaagagataatgctatctagcaaagctataatgagaagaaatgggttagcaatattaagttcagtcaacgctgacacactggtttatgtaatacaactcccattatttggtgttatggacacagattgttgggtaataagaagttctatagactgtcataacatagcagacaagtatgcttgtttggctagagctgataatggctggtattgtcacaatgctggctcattatcatacttcccgtcgccaacggattgtgagatccacaatgggtatgctttctgtgacactctaaaaagtctaactgtacctgtaacatcacgagaatgcaactcaaacatgtataccactaactacgattgtaagatttccacaagtaaaacttatgtgagtacagcggtactgactacaatgggttgcttggtatcttgttatggtcataacagttgcacagtcatcaataatgacaaaggtataataaggactctgccagatggttgccactacatctccaacaaaggtgtggacagggttcaagtaggtaacactgtttactatcttagcaaagaagttggcaagtcaattgttgtcagaggggaaccattggtcttgaaatatgaccctttgagtttccctgacgataaatttgatgttgctataagagatgtggagcatagcatcaatcagacacgcacattcttgaaggcctctgatcagttattggacttaagtgaaaacagagagaataaaaatttaaacaagtcatatatactaacaactctgctcttcgttgtaatgcttattataataatggctgtcatagggttcattctgtataaggtattgaaaatgatcagagacaacaagttgaaatccaaaagtacacctggcctcacagttttatcatgacaattgtaccaaaccataattgagttagttaattaaaaacttaggataagtgacaatccagacccaacacctctttcaactctcaaggataaggtaggatgagtgtgagaccttgcaaatttgaggttcaagggttttgttccagagggaggaattgcaagtatagtcataaatattgggaatggcctttgaaaactcttatgctcaggcagaactacatgcttaataggatttataggttcctcgacaccaacacagatgcaatgtcagatgtcagcggatttgatgcaccacaaaggactgctgagtatgccttgggaaccataggtgtgctgaaaagttacctggaaaaaactaacaacatcactaaatcaatagcttgtggcagtttgatcactgtattgcagaacttggatgttggtctagtaatacaagcaagagatagcaacactgaggacaccaattacttgagaagttgcaacactatactgtcttatatagacaagatacacaagaagagacaaattattcacattctcaaaagactgccagtaggagtactatgcaatctgatccaatctgtcatctccatcgaggagaagataaattcttctatgaaaacagaatgataaggctgcctaaatactatccagccatactgcataagatgtatattattagagtaaatagaaacctcacttacgatgggtctggaccatccacaataatagatgcaggaaagtctgtggtgtggaatcgtgttgatgtgatagcttgtgtgaaagaggccttgtgctgcatagaattcagctggaataaccaagtgatcatagactttgattatagccaggccagatgatgtggactgtattcctttttttgtcagtaatcagttattaacccaaaattgttaattatgtagactttaagttaactaacttcatgttaattcaatagttatataaaaaaatattcgaattaggatcaatatggatcctattgatgaacaagaagttaatgtgtacttgccggatagctacttaaagggtgttatatcttttagtgaaactaatgctcttggcagctgtatcattggtagacctttcttgaaggatgactttactgccactacttcaatccgtaaccccctaattgaacataaaagaataagggacactaaattagtaaaaaatattgtttcaaaccctcaatataggttagtggagcctctccaaatgcagcatgagctcttgagtgtactatcgcccaatttcatattgcacactgccaacttaaggaaaattatacaaagaagtgttgacataacagataaaaagttgaaccccattttgcacattttgaatcttaattctcctaaccaagagggtaaggtgtcggaacggctaactaggctaattaagaaacatctctctcacatacctaattgggtaagcagctggtacaatatatgggtcaatcttaacaacttactgcaggagtaccgttcaaaggaagttatagaccataactgtgttctgactaggcaattgtctggaagtttcatacatgtggtcatgagtcaatatggagttgtgataattagcaaaaaaagtaaaagatatacaatgtgtacttataaccaattcctaacctggaaggaccttgccttgagcagatttaatgccaattatgtggtctggctaagtaatgtgttaaacacactcaacgaggggttgggattaaggtgtagattaaaaggtcatctgctcagtaagttgtacatttccactgacatctttttatcttcaacatctaatgaattttataatgtggtcaaggaatttgagggcttcatcatgtcactgatattgaaacaaactgaggaagccttatttagcacaaggttttataataacatgttgaacaacttaattgatgccattgatagggctcgactagagtatctggcccgctgtgccaattcagctgccaggattaatttacctagtacagatgttatgatagcatcattgggtgatatcttatctttgataaacgttttaggtgaatccaaccttaacaacttaagtgagttatattttatcttcaggatatttggtcaccctatggttgatgagaggaaggccatggatgcagtcagagataactgttgtgaaacaaagtttctgacggctaagaaccttgcatcgttaagaggagcatatgtttatagaattatcaaaggattcgtagcaaattataacaggtggccttacataaaaactagagtttgccttacaccaacatggattaactatcttgacaccaattcatgtccctcattattagagatgacagaagatgattttattgtgttagctggagtgcactttataagagaattccacatcccaaagctaactgatctggagattatattaaatgacaaggccatatctcctccaaaatcactcatttggtcatgctttccaaaaaactacatacctcaggttatacaagatgagtatgcccggaggtattgtagagctaaagcacctttgaagacaagacgtgtcttggagttctacttacaggacaaggatttcaagttggatcagctccatagagtagtagtgaaccaggactaccttaatgataaagaacatataatttctttaacaggaaaagaaagagagttgggtgttggtaggatgtttgccatgcaacctgggaagcagaggcaagtccaaattttagcagagaagctgttggctgataacatcctgcaattctttccggagacactgactagatacggtgatttggagctgcaaaagatactagagttaaaagctggactttcaaataaaaatgacagatctaaagactcctacaataattatataagtaggtgctcattaattactgatttaagtaaatttaaccaagcttttaggtacgagtcatcctgtgtgtgtagtgatcttttagatgagctacatgggactcaaagcttattctcttggctgcatttaacagtaccactgactactataatgtgtacatataggcatgcgccgccggacactggaaacaactataatgtagatgatattgctgagcagagtggactctaccgctaccacatgggcgggattgagggctggtgccagaagctctggacaacagaggccattgctttgctagatactgtagctgtgaagggccgtttccagctaacttcattaataaatggcgacaaccaaagtattgatatttcaaaaccaacaaggctggggaccaggactcaaagtgaagcagattatgatttggcaataaattctttaagattaatatcagcagcttataaaggcattggacataaattaaaagaaggtgagacctacttgtcacgtgacatgcagttcatgagtaaaacaatacaacatgaaggggtctactacccggcctccatcaagaaaatattaagagttggtccctggatcaacacaatattagatgatataaaaacttcaacagaaagtattggttctctaactcaagaactagaatataaaggtgaaagtttaatgagcagcctgctgctgaggaacttctggctctacagattatattcagtggatttaaaagatcattctttgtgtggaaagcagctctacagatccttaataaaagtgttaaaacatttgaagaggtgcttcaacctggagaaccttggggaatgtttggaattatttttaaatgtgcccatgcagtttggaggtgctgacccaaatgtcatctacaggagcttctacagaagaactccagattttctaacagaaagtataactcatctcatcctcattttaaaacattttagaagagatttggaattcaacaaagataatgtctccaaagctgttctttctttgctagagttcaccaagaatgattctgcagaatttgtaactttgatgagagatcctcaagcaattggtagtgagaggcaggccaagatcacttcagacatcaacagaacagctgtaacttcagtgttatcaaatgctccaaatgaaatatttagaacttcagctcttcattacagcagcacagaaaatgaattaaatggaatagcaagtggagtttctcctgtttatcctcatggtcttcgagttttatatgaaagtttacctttttataaagcagagaagattgtcaacatggtttctgggaccaagtccatcaccaacatactggagaagacatcagccatctcctacacagatataattcgagccaccaacatgatggtggagaacctcactttgctaacaagaataatgaaaccaggtgctgacacatctttggatcctgacacaatagtaataacaatattatcaaaaataataagagataaatcctgggatgttggtgatataattggtgtcacttccccatctcctgtctcctgcttcaaggtggtctacacatcaactctacaaaataattcagtagtaatagaaagatacacaacagacacctacacaagaggtaagagaggccccaccaagccctgggtgggcagcagcacacaggagaagaagtccatgcctgtctacaacagacaagttttaacaagaggacaaagagatcaaatagaaaatatagcaaagctggagtgggtgttttcttcagtagcaaatattgattctttgctaaatgagctcagcaccatgactttgggtctttctctaaggaaatgtagacaactttttccaacatatttaagtttaaacttcctgcacaggctttctgtcagcagcaggcccagagaatatccttcttctcttcctgcctacaggacaacaaattttcattttgatactggaccaataaataaagtgttaacagaaagatttggagatgaagatataaatttggtatttcaaaatgcaatatcatatggtctttccaccatgtctttggtggagcagtttactggtgtctgtccaaataaagttttgctggtgcccaagctacaagaaatacaactaatgaaagttccaatatttcaaggtggcttcaacctacaaagtataattccaataataaggcagcagcacatgttcctgcccaaccacatcactccagcccagtatattgaattatttctttcttcaaaacaatttcattcaagaataaatttaaaacacaacaacagatttaaacttgttttacaaaaagattattttaatggggagaacatgatagaaactttgtccacctgtttggcaggccactggatcatcattttgatgctaatgaaggagagtcaggggatatttgacaaggagtggtatgatggttttgtaacagaccacatgttcctggacctgcagctcttcctctcctccttcaagacatttctaactgtcttcaactttgcttatttaaaagttggttcaaatatagaagaaataacaggaaatcaagccaacctgctggagctgctggacctgggctactggaagaacatgtataaagtattttcagagaccaaggtgcggctggctttgctaaaacaagatttatcatttaattctgtgaagaacagcagcagcttccggcactggtttataaattctctacaagaagtacaatgtacttctgtgccttgggtggtaaatgtaacaagaaatccaactcatttaaaaggtgttctacagtacatgaagatgatagaaagtggcatgattcaaggttattcagcaaatatttcttcagttttaagtatcccatataattatccagacatggcgcacatgatgacaaaaataataagaaatcgaggccacatgtcctatgattatccaaagatgaagaaaagtttaactttctccatgacagacatgagtgacagctacatgctcaacctcttccccaaagtagaatgttcttacatgagtggttatttggataaactagatgatactctacaacttctaaagaaacctcctgttggaagaaaagttccttctgtggctttgccctggcaccactgcaacagatacaactttgtcttcagcagcacaggctgcaaagtttctgtcattgacatgcttccaaaacatttccgaagaagtaatttaaaagtaatatgttttattggagaaggggcgggcaacctcatgctaagagctgttttggaagttggtggaaatataaaattaatatatagatccttaaaagatcctgatgatcatcatgttcctgtagaatttctaagattaaaaccttgttatccttatattgatactggtggcagtttatctttggcttcaacagatgccaccaacaaggcccactgggattatttacatcttcactggacagatcctttaaatttaatagtatgtgatgcagaaataagtggtgtgaagcactggctaaaaattcttcacaggtggtatgagcacatgacttcctgcaagcactgtttaaaatcagaacatgataaatatttaataataaaatatcatgctcaagatgatttaatagatcttcctcatggtgtcaggctactaaaatgtaacatctgcctgggctccaaactaagtggcagtgagagctacctgctcattggtcttggtctttcaaataaacttcctgtctacagtgaagttcttcattcaaaacttcttttggcagaatgtcatcagtttcatcatccaaaatatttggatgtttctggaataaatacaaatataaaatccttaataccaatgttggattatccaataacttacaacaagatcaccactttgctagaaagtgtgcgggagctttcttcaaataaaaacaagaacaccatgtggattggaagaaatcctgtctaccataataaatggctaaagaggaaatatttcaacattttaaaatggctaaaatactgtatagaacttcctgccttcaggatggattataattcatttgagagaatagaaatgctttatccaaatttaagagatttggtagattctgtttctacttcagagctgaagaaagtaataaaagtaacaggcatcctcttcaggagcaacaccatgtgaattaatatgccaatgctaacatgtcatccccactactttttttgttcaatcactctcagtctagacatgtgagaagatcccaaacccaactgcacccctcccactcgaaatcagttgtagcctcagcagctccatctgccatgatctctgaccagcagcaaatgtattattattttaatttgtctatagttaacaaaaaattgatatctcacaggttgtaaacatagttcttttataattattgttagttaaactattgtgtttgacttcctttgggtatttttttcccgtgggtcggcatggcatctccacctcctcgcggtccgacctgggcatccgaaggaggacgcacgtccactcggatggctaagggagagcctgcagtagcataaccccttggggcctctaaacgggtcttgaggggttttttgctgaaaggaggaactatatacgcgtcgacgggcccgcgctcactggccgtcgttttacaacgtcgtgactgggaaaaccctggcgttacccaacttaatcgccttgcagcacatccccctttcgccagctggcgtaatagcgaagaggcccgcaccgatcgcccttcccaacagttgcgcagcctgaatggcgaatgggacgcgccctgtagcggcgcattaagcgcggcgggtgtggtggttacgcgcagcgtgaccgctacacttgccagcgccctagcgcccgctcctttcgctttcttcccttcctttctcgccacgttcgccggctttccccgtcaagctctaaatcgggggctccctttagggttccgatttagtgctttacggcacctcgaccccaaaaaacttgattagggtgatggttcacgtagtgggccatcgccctgatagacggtttttcgccctttgacgttggagtccacgttctttaatagtggactcttgttccaaactggaacaacactcaaccctatctcggtctattcttttgatttataagggattttgccgatttcggcctattggttaaaaaatgagctgatttaacaaaaatttaacgcgaattttaacaaaatattaacgcttacaatttaggtggcacttttcggggaaatgtgcgcggaacccctatttgtttatttttctaaatacattcaaatatgtatccgctcatgagacaataaccctgataaatgcttcaataatattgaaaaaggaagagtatgagtattcaacatttccgtgtcgcccttattcccttttttgcggcattttgccttcctgtttttgctcacccagaaacgctggtgaaagtaaaagatgctgaagatcagttgggtgcacgagtgggttacatcgaactggatctcaacagcggtaagatccttgagagttttcgccccgaagaacgttttccaatgatgagcacttttaaagttctgctatgtggcgcggtattatcccgtattgacgccgggcaagagcaactcggtcgccgcatacactattctcagaatgacttggttgagtactcaccagtcacagaaaagcatcttacggatggcatgacagtaagagaattatgcagtgctgccataaccatgagtgataacactgcggccaacttacttctgacaacgatcggaggaccgaaggagctaaccgcttttttgcacaacatgggggatcatgtaactcgccttgatcgttgggaaccggagctgaatgaagccataccaaacgacgagcgtgacaccacgatgcctgtagcaatggcaacaacgttgcgcaaactattaactggcgaactacttactctagcttcccggcaacaattaatagactggatggaggcggataaagttgcaggaccacttctgcgctcggcccttccggctggctggtttattgctgataaatctggagccggtgagcgtgggtctcgcggtatcattgcagcactggggccagatggtaagccctcccgtatcgtagttatctacacgacggggagtcaggcaactatggatgaacgaaatagacagatcgctgagataggtgcctcactgattaagcattggtaactgtcagaccaagtttactcatatatactttagattgatttaaaacttcatttttaatttaaaaggatctaggtgaagatcctttttgataatctcatgaccaaaatcccttaacgtgagttttcgttccactgagcgtcagaccccgtagaaaagatcaaaggatcttcttgagatcctttttttctgcgcgtaatctgctgcttgcaaacaaaaaaaccaccgctaccagcggtggtttgtttgccggatcaagagctaccaactctttttccgaaggtaactggcttcagcagagcgcagataccaaatactgtccttctagtgtagccgtagttaggccaccacttcaagaactctgtagcaccgcctacatacctcgctctgctaatcctgttaccagtggctgctgccagtggcgataagtcgtgtcttaccgggttggactcaagacgatagttaccggataaggcgcagcggtcgggctgaacggggggttcgtgcacacagcccagcttggagcgaacgacctacaccgaactgagatacctacagcgtgagctatgagaaagcgccacgcttcccgaagggagaaaggcggacaggtatccggtaagcggcagggtcggaacaggagagcgcacgagggagcttccagggggaaacgcctggtatctttatagtcctgtcgggtttcgccacctctgacttgagcgtcgatttttgtgatgctcgtcaggggggcggagcctatggaaaaacgccagcaacgcggcctttttacggttcctggccttttgctggccttttgctcacatgttctttcctgcgttatcccctgattctgtggataaccgtattaccgcctttgagtgagctgataccgctcgccgcagccgaacgaccgagcgcagcgagtcagtgagcgaggaagcggaagagcgcccaatacgcaaaccgcctctccccgcgcgttggccgattcattaatgcagctggcacgacaggtttcccgactggaaagcgggcagtgagcgcaacgcaattaatgtgagttagctcactcattaggcaccccaggctttacactttatgcttccggctcgtatgttgtgtggaattgtgagcggataacaatttcacacaggaaacagctatgaccatgattacgccaagcgcgcccgggtaatacgactcactataggg

SEQ ID NO: 21 - DNA, 18758 bp, synthetic construct
  source 1..18758: mol_type = other DNA
acgcgaaaaaatgcataacaaaactatcaacctgaaaaaagttaggacaagtgaagattgctagtcccaaagaccagaatcatgggctgtaatgtgatgatggagcttgattatggtggacgagctgcatggctggcattccacataaccaactttgataggtcagatttggaaactatcctaagaggtgctagggtgtgcaatacatggcaagatcagagactctccgtgtaccttgtgggaagggattgcaatttgttaagaccatttgtgcaagctgccaaatttatccataatactaggagaggccaaacattaacacattggttcacaaaaaatatcgtgtttagttctacagggcaagagacagagcctcccattgaccccacatgtgagctgttggtagagctgatcagtggttaagatgacagcacattatgtagttaattaaaacaaagggtaggacaagtcctaatgtccacagctatgaacaagttcactcagaccatctctaaacctgccactatcttgaatatttcagacagtgaagagtcgggcgatgaggcaggggtgggcaaggtgtcccgtaccacacagagctcagagaggtggcttgatttgctcattgaaaagttccagccgagcctacaaaacatcactagatacatcaactggaacttcatcaggatctgcaatgataggcttaaaaaagaaaaaatggggtacattgaggccaagcaatatgtggaagacatggcttggatggtgatagcatctgaggcagacagcattgagtggaagtgcataaggaggcaggagaaagtgactggggtgaaatacccaaagttcttctttgtacaacacaaagaggactggattgagtgcacaggatgcattccgtacccaggccatgacttgatctatgatgaggatgatgatgactgagctgactcagatcactccaaccagcagagagatccaccacctatagcaagtgatgtagtatttagtctatgattagttatagaaaaacattaggataaatacacatcctaggccgggccaaaatgtctctagacagattgaagctcaatgatgtctcaaacaaggatagcctgctgtccaactgcaaatacagtgttaccagatccacaggcgatgtaaccagtgtgtctggtcatgctatgcagaaagcccttgcaaggacactcggcatgttcttacttactgccttcaaccgttgcgaagaagtggcagaaatagggctccaatatgccatgtccttgctaggcagagatgatagcatcaagatattaagagaagccggctacaatgtaaaatgtgtggacacacagctcaaggactttacaatcaaattacaaggaaaggaatacaaaatacaagtcctagatatagtgggaatagatgcagccaatttagctgatctagagatacaagccagaggagtggtagcaaaagaactcaaaacaggagccaggctacctgacaatcggaggcatgatgcaccagattgtggtgtgatagttctctgtattgcagcattagttgtttccaaattagctgcaggggacaggggaggacttgatgctgtggaaagaagggctttaaatgtgctgaaagccgagaaagccaggtaccccaacatggaggtcaagcagatagctgaaagtttttatgatctgtttgaaaggaagccttattacattgatgtcttcatcacttttggcctggcccagtctagtgtcaagggaggcagcaaagttgaggggctgttttcaggtctcttcatgaatgcatacggggcaggacaagttatgctgaggtggggtttactggcaaaatctgtcaagaacatcatgctaggccatgctagtgtacaagctgagatggaacaggtggttgaggtttacgaatatgctcagaagcaaggaggggaggcaggattctatcacatcagaaataatccaaaagcttcacttctctctttgaccaattgtcctaatttcaccagtgttgtgcttggcaatgctgcaggtttaggcatcatagggtcatataagggtgctcctaggaatagagaactctttgatgctgccaaagattatgcagaaagattaaaggacaacaatgtaattaactacagtgcattaaacttgactgcagaagaaagagagctgatcagccagcagctgaacattgttgatgacactcctgatgatgatatttaattaaaactggaaaatgtaggataaatagccgccaccatgttcgtgtttctggtgctgctgcctctggtgagctcccagtgcgtgaacctgaccacaaggacccagctgccccctgcctataccaattccttcacacggggcgtgtactatcccgacaaggtgtttagatctagcgtgctgcactccacacaggatctgtttctgcctttcttttctaacgtgacctggttccacgccatccacgtgagcggcaccaatggcacaaagcggttcgacaatccagtgctgccctttaacgatggcgtgtacttcgcctccaccgagaagtctaacatcatcagaggctggatctttggcaccacactggacagcaagacacagtccctgctgatcgtgaacaatgccaccaacgtggtcatcaaggtgtgcgagttccagttttgtaatgatccattcctgggcgtgtactatcacaagaacaataagtcttggatggagagcgagtttcgcgtgtattcctctgccaacaattgcacatttgagtacgtgtcccagcccttcctgatggacctggagggcaagcagggcaatttcaagaacctgagggagttcgtgtttaagaatatcgatggctacttcaagatctactccaagcacaccccaatcaacctggtgcgcgacctgccacagggcttctctgccctggagccactggtggatctgcccatcggcatcaacatcacccggtttcagacactgctggccctgcacagaagctacctgacaccaggcgacagctcctctggatggaccgcaggagctgccgcctactatgtgggctatctgcagcccaggaccttcctgctgaagtacaacgagaatggcaccatcacagacgccgtggattgcgccctggatcccctgtctgagaccaagtgtacactgaagagctttaccgtggagaagggcatctatcagacaagcaatttcagggtgcagcctaccgagtccatcgtgcgctttcccaatatcacaaacctgtgcccttttggcgaggtgttcaacgcaacccgcttcgccagcgtgtacgcctggaataggaagcgcatctccaactgcgtggccgactattctgtgctgtacaacagcgcctccttctctacctttaagtgctatggcgtgagccccacaaagctgaatgacctgtgctttaccaacgtgtacgccgattccttcgtgatcaggggcgacgaggtgcgccagatcgcccctggccagacaggcaagatcgccgactacaattataagctgcctgacgatttcaccggctgcgtgatcgcctggaactctaacaatctggatagcaaagtgggcggcaactacaattatctgtaccggctgtttagaaagtctaatctgaagccattcgagagggacatctccacagagatctaccaggccggctctaccccctgcaatggcgtggagggctttaactgttatttccctctgcagagctacggcttccagccaacaaacggcgtgggctatcagccctaccgcgtggtggtgctgtcttttgagctgctgcacgcacctgcaacagtgtgcggaccaaagaagagcaccaatctggtgaagaacaagtgcgtgaacttcaacttcaacggactgaccggcacaggcgtgctgaccgagtccaacaagaagttcctgccttttcagcagttcggcagggacatcgcagataccacagacgccgtgcgcgaccctcagaccctggagatcctggatatcacaccatgctccttcggcggcgtgtctgtgatcacaccaggcaccaatacaagcaaccaggtggccgtgctgtatcaggacgtgaattgtaccgaggtgcccgtggcaatccacgcagatcagctgacccctacatggcgggtgtactctaccggcagcaacgtgttccagacaagagccggatgcctgatcggagccgagcacgtgaacaatagctatgagtgcgacatccctatcggcgccggcatctgtgcctcctaccagacccagacaaactccccagggtctgcctcctctgtggccagccagtccatcatcgcctataccatgagcctgggcgccgagaattccgtggcctactccaacaattctatcgccatccctaccaacttcacaatctccgtgaccacagagatcctgccagtgagcatgaccaagacatccgtggactgcacaatgtatatctgtggcgattccaccgagtgctctaacctgctgctgcagtacggctctttttgtacccagctgaatagagccctgacaggcatcgccgtggagcaggacaagaacacacaggaggtgttcgcccaggtgaagcagatctacaagaccccacccatcaaggactttggcggcttcaacttcagccagatcctgcccgatcctagcaagccatccaagcggtcttttatcgaggacctgctgttcaacaaggtgaccctggccgatgccggcttcatcaagcagtatggcgattgcctgggcgacatcgccgccagagacctgatctgtgcccagaagtttaatggcctgaccgtgctgcctccactgctgacagatgagatgatcgcccagtacacatctgccctgctggccggcaccatcacaagcggatggaccttcggcgcaggagccgccctgcagatcccctttgccatgcagatggcctatcggttcaacggcatcggcgtgacccagaatgtgctgtacgagaaccagaagctgatcgccaatcagtttaactccgccatcggcaagatccaggactctctgagctccacagccagcgccctgggcaagctgcaggatgtggtgaatcagaacgcccaggccctgaataccctggtgaagcagctgtctagcaacttcggcgccatctcctctgtgctgaatgatatcctgagcaggctggaccctccagaggcagaggtgcagatcgaccggctgatcacaggcagactgcagtccctgcagacctacgtgacacagcagctgatcagggcagcagagatcagggcctctgccaatctggccgccaccaagatgagcgagtgcgtgctgggccagtccaagagagtggacttttgtggcaagggctatcacctgatgagcttcccacagtccgcccctcacggagtggtgtttctgcacgtgacctacgtgccagcccaggagaagaacttcaccacagcaccagcaatctgccacgatggcaaggcacactttcctagggagggcgtgttcgtgagcaacggcacccactggtttgtgacacagcgcaatttctacgagccacagatcatcaccacagacaatacattcgtgtccggcaactgtgacgtggtcatcggcatcgtgaacaataccgtgtatgatcctctgcagccagagctggactcttttaaggaggagctggataagtacttcaagaatcacaccagccccgacgtggatctgggcgacatctctggcatcaatgccagcgtggtgaacatccagaaggagatcgacaggctgaacgaggtggccaagaatctgaacgagtccctgatcgatctgcaggagctgggcaagtatgagcagtacatcaagtggccctggtatatctggctgggcttcatcgccggcctgatcgccatcgtgatggtgaccatcatgctgtgctgtatgacaagctgctgttcctgcctgaagggctgctgttcttgtggcagctgctgtaagtttgatgaggacgatagcgagcctgtgctgaagggcgtgaagctgcactacacctgatagtatttaattaaaactggaaaatgtaggataaatatggagaaattcgcccccgaatttgttggcgaggatgctaacaagaaggcagaggagtttctcaaacatagatccttcccttcggaaaaaccactagctggtataccgaacactgccactcatgtcaccaaatataacatgccccctatattgcgtagctcattcaaactcccttccccgagagttgctgcaaatcttactgaaccctctgctccccctaccactccaccacccacacctccccagaacaaggaagagcagcccaaagagtctgatgttgacattgagactatgcatgtctgtaaggttcctgacaatccggaacacagcaagaagccatgctgctcagatgataccgatactaagaaaactaggaagccgatggtcacctttgtggaacccgaggagaaatttgtcggattgggagctagcttgtacagggagaccatgcagacctttgctgctgatggttatgatgaagaaagcaacctatcgtttgaggagactaaccaagagccgggttcttcatctgtagaacaaagactagatagaatagaggagaaattgtcctacataataggccttttaaacaccataatggtagcgactgctggacctaccactgctagagatgagattagagatgcccttataggcactagagaagaacttattgagatgatcaagtctgacatcttgactgtcaatgacagaatagtggccatggagaagctcagagatgaggaatgctccagagctgacactgatgatggatcagcctgttatttaacagacagagcaaggatactagataagatagtgtccagcaatgctgaagaggctaaggaagatttggatgttgatgacatcatgggcattaatttttagttaattaaaataacaacaggacaaataatggaggcctacttggtagagatgtaccatggtgtcccatatacagctgcagtacagctaaacttggttgaaaaacattcagccaacatatcactaactgtgtggataccgatgtttcaaacatctctaccaaagaactccgttatggacctgctacatgatgttacagtcatttgtacacagatatcaacagtgcatggtcccatgatcaaggtagatctgagctcttccaatgcaggtttagctaccatgccaaggcaattcttgataaatgctatcatagctttggatgactggggcaacatggattacgaagtgcctgttgcttttgataaaaagagcttctgtgtgacaattcttaagcctaaaaacatgctttacactgtacccagcattactcccactaatcgacctactcatgagctgatagctgtctgctctttccataacagggtaacattaaagtcattcaatatacctgtcttcatcagagcactgtctatcagacagcaggaccttgatagtgtggagcaggctataagctccgatgtggaccatgctataacaacagctagggtggctccctatgcagggcttacacttgtgatcaacatcacatccaccaaaggagcattcaaactgctaaaggcaggtagtcagattcttgcagaactgggtccctatctgacgcaggtgagcctacatgatgtgattatgaactggaaacatacaggcacttcctacatactcaagagctcctcaacaagtggatgaaaaagagaaagtcaccattgatcagctcaatccacaactacaaccccacgatttcacacagcacaacaaccaccgccaccaacatccacatgacaaccacacatacacacccacatacatatatacacatatcttagttaaataaaatcaggataaataatggatcctaacatgacctcacaccagatcaccctcgagatcaacatgaccagcagccgtattggcacatacactacaccagccccaacagctcttctccttgcatgtgccgtcatcaacacagtgtgtgcgctgataatggcctgcagcagtagaagcactgccacatcaggcattgtcagcagccaatgcacagttcatcccaatcaccctccaccaagttatggcgtcaatgtaactggtctgccgggtaacctatactcaaggaacactacataacattataaataacagaaattatccttcaataaaccccaggccagacagctttaccctgctagacgattcaatcagcccttgcagtatgtcgtctagttaacaaaaaaccggtaggataagtactatcctattggaaccaaacgagacctgtagagcagctcacacaagagaaccacaagctgacttcacctagtatgggaaggaacttagaagtgagtggcagcattaccaatttgaactttgagagaactcagcatcctgacacatttaggactgttgtaaaagtgaaccaaatgtgtaagcttattgcaggtgtgctcacaagtgctgctgtggcagtttgtgtgggggtcataatgtattctgttttcacatcaaaccacaaggccaactccacgcagaatgccacgacccggaacagcacatccacccctccccaaccaaccgccggtctgcccaccacagagcaagggaccatccccagattcaccaaaccccccaccaaaaccgccacccaccatgagatcacagagcccgtcaaaatggcaacaccttcagaggatccctaccaatgctccagcaatggttatttggaccgacctgatttacctgaaaatttcaaactcgtattggatgttatatgcaagcctccaggtcctgaacatcacaacaccagctgttatgagaaacgtgaaatcaacccaggaagtgtttgccctgatcttgtaacaatgaaggcaaacatgggcttaaacaatggtggtggggaggatgctgcaccttatatagaggttaccaccctttctacgtactccaacaaaagggcaatgtgtgtccacaatgggtgtgatcaaggcttctgtttcttcctttctggtttaagcactgatcaggagagagctgtgctagagcttggaggtcaacaggctatcatggagttgcattatgattcctactggaaacactattggagtaactctaattgtgttgttcccagaacaaactgcaacctgacagaccaaactgagattttgtttcctaggtttaacaacaagaatcagtctcagtgtaccacctgtgcagattcagctggcctagataacaaattttatctcacatgtgatgggcttttaagaaccctccctctagttggactacccagcctaagtcctcaggcttacaaagctgtacccacacaaactacaggcaccaccacggcaccaacatcagagacgaggcacccaacccctgcacccaggaggtccaaacctctcagtcggaagaagagagctttatgtggtgtagactcaagcagagaacccaaaccaacaatgccttactggtgtcctatgctccaattatttccaaggaggtctaattcttaagtgacctattcctgaattaacttcagaataagtaccaaccttatcagtagttaatgaaaactaagctttgatataataggacaaatatgattcctggcaggatctttctagtccttctggtgatcttcaacaccaagccaattcacccaaatacattaacagaaaaattctatgagtccacatgtagtgttgagactgcaggttataagagtgcccttagaacaggttggcatatgacagttatgtcaattaagttgtctcaaataaatattgagtcatgcaagagcagcaactcgttattggctcatgagcttgcaatctatagtagtgcagtggatgaattgagaacgttatcatccaatgccttgaagtccaaaaggaagaagaggttcctcggtttgattcttggtctcggagctgcagtcactgccggggtggctttagccaagacagtgcaacttgaaagtgagattgcattgattagagatgcagtgagaaatacaaatgaggctgttgttagcctaaccaacggcatgtcagtgttggctaaagtggtggatgatttgaaaaacttcatatctaaagaattactcccaaaaataaaccgagtctcttgtgatgtgcacgacatcactgccgtcattagattccaacagctcaacaaaagacttttggaagtatctcgtgaattttcatctaatgcaggattaacacacactgtttcatcttttatgttaacagaccgggaactcacctccattgtaggcggcatggctgtttcagcaggccaaaaagagataatgctatctagcaaagctataatgagaagaaatgggttagcaatattaagttcagtcaacgctgacacactggtttatgtaatacaactcccattatttggtgttatggacacagattgttgggtaataagaagttctatagactgtcataacatagcagacaagtatgcttgtttggctagagctgataatggctggtattgtcacaatgctggctcattatcatacttcccgtcgccaacggattgtgagatccacaatgggtatgctttctgtgacactctaaaaagtctaactgtacctgtaacatcacgagaatgcaactcaaacatgtataccactaactacgattgtaagatttccacaagtaaaacttatgtgagtacagcggtactgactacaatgggttgcttggtatcttgttatggtcataacagttgcacagtcatcaataatgacaaaggtataataaggactctgccagatggttgccactacatctccaacaaaggtgtggacagggttcaagtaggtaacactgtttactatcttagcaaagaagttggcaagtcaattgttgtcagaggggaaccattggtcttgaaatatgaccctttgagtttccctgacgataaatttgatgttgctataagagatgtggagcatagcatcaatcagacacgcacattcttgaaggcctctgatcagttattggacttaagtgaaaacagagagaataaaaatttaaacaagtcatatatactaacaactctgctcttcgttgtaatgcttattataataatggctgtcatagggttcattctgtataaggtattgaaaatgatcagagacaacaagttgaaatccaaaagtacacctggcctcacagttttatcatgacaattgtaccaaaccataattgagttagttaattaaaaacttaggataagtgacaatccagacccaacacctctttcaactctcaaggataaggtaggatgagtgtgagaccttgcaaatttgaggttcaagggttttgttccagagggaggaattgcaagtatagtcataaatattgggaatggcctttgaaaactcttatgctcaggcagaactacatgcttaataggatttataggttcctcgacaccaacacagatgcaatgtcagatgtcagcggatttgatgcaccacaaaggactgctgagtatgccttgggaaccataggtgtgctgaaaagttacctggaaaaaactaacaacatcactaaatcaatagcttgtggcagtttgatcactgtattgcagaacttggatgttggtctagtaatacaagcaagagatagcaacactgaggacaccaattacttgagaagttgcaacactatactgtcttatatagacaagatacacaagaagagacaaattattcacattctcaaaagactgccagtaggagtactatgcaatctgatccaatctgtcatctccatcgaggagaagataaattcttctatgaaaacagaatgataaggctgcctaaatactatccagccatactgcataagatgtatattattagagtaaatagaaacctcacttacgatgggtctggaccatccacaataatagatgcaggaaagtctgtggtgtggaatcgtgttgatgtgatagcttgtgtgaaagaggccttgtgctgcatagaattcagctggaataaccaagtgatcatagactttgattatagccaggccagatgatgtggactgtattcctttttttgtcagtaatcagttattaacccaaaattgttaattatgtagactttaagttaactaacttcatgttaattcaatagttatataaaaaaatattcgaattaggatcaatatggatcctattgatgaacaagaagttaatgtgtacttgccggatagctacttaaagggtgttatatcttttagtgaaactaatgctcttggcagctgtatcattggtagacctttcttgaaggatgactttactgccactacttcaatccgtaaccccctaattgaacataaaagaataagggacactaaattagtaaaaaatattgtttcaaaccctcaatataggttagtggagcctctccaaatgcagcatgagctcttgagtgtactatcgcccaatttcatattgcacactgccaacttaaggaaaattatacaaagaagtgttgacataacagataaaaagttgaaccccattttgcacattttgaatcttaattctcctaaccaagagggtaaggtgtcggaacggctaactaggctaattaagaaacatctctctcacatacctaattgggtaagcagctggtacaatatatgggtcaatcttaacaacttactgcaggagtaccgttcaaaggaagttatagaccataactgtgttctgactaggcaattgtctggaagtttcatacatgtggtcatgagtcaatatggagttgtgataattagcaaaaaaagtaaaagatatacaatgtgtacttataaccaattcctaacctggaaggaccttgccttgagcagatttaatgccaattatgtggtctggctaagtaatgtgttaaacacactcaacgaggggttgggattaaggtgtagattaaaaggtcatctgctcagtaagttgtacatttccactgacatctttttatcttcaacatctaatgaattttataatgtggtcaaggaatttgagggcttcatcatgtcactgatattgaaacaaactgaggaagccttatttagcacaaggttttataataacatgttgaacaacttaattgatgccattgatagggctcgactagagtatctggcccgctgtgccaattcagctgccaggattaatttacctagtacagatgttatgatagcatcattgggtgatatcttatctttgataaacgttttaggtgaatccaaccttaacaacttaagtgagttatattttatcttcaggatatttggtcaccctatggttgatgagaggaaggccatggatgcagtcagagataactgttgtgaaacaaagtttctgacggctaagaaccttgcatcgttaagaggagcatatgtttatagaattatcaaaggattcgtagcaaattataacaggtggccttacataaaaactagagtttgccttacaccaacatggattaactatcttgacaccaattcatgtccctcattattagagatgacagaagatgattttattgtgttagctggagtgcactttataagagaattccacatcccaaagctaactgatctggagattatattaaatgacaaggccatatctcctccaaaatcactcatttggtcatgctttccaaaaaactacatacctcaggttatacaagatgagtatgcccggaggtattgtagagctaaagcacctttgaagacaagacgtgtcttggagttctacttacaggacaaggatttcaagttggatcagctccatagagtagtagtgaaccaggactaccttaatgataaagaacatataatttctttaacaggaaaagaaagagagttgggtgttggtaggatgtttgccatgcaacctgggaagcagaggcaagtccaaattttagcagagaagctgttggctgataacatcctgcaattctttccggagacactgactagatacggtgatttggagctgcaaaagatactagagttaaaagctggactttcaaataaaaatgacagatctaaagactcctacaataattatataagtaggtgctcattaattactgatttaagtaaatttaaccaagcttttaggtacgagtcatcctgtgtgtgtagtgatcttttagatgagctacatgggactcaaagcttattctcttggctgcatttaacagtaccactgactactataatgtgtacatataggcatgcgccgccggacactggaaacaactataatgtagatgatattgctgagcagagtggactctaccgctaccacatgggcgggattgagggctggtgccagaagctctggacaacagaggccattgctttgctagatactgtagctgtgaagggccgtttccagctaacttcattaataaatggcgacaaccaaagtattgatatttcaaaaccaacaaggctggggaccaggactcaaagtgaagcagattatgatttggcaataaattctttaagattaatatcagcagcttataaaggcattggacataaattaaaagaaggtgagacctacttgtcacgtgacatgcagttcatgagtaaaacaatacaacatgaaggggtctactacccggcctccatcaagaaaatattaagagttggtccctggatcaacacaatattagatgatataaaaacttcaacagaaagtattggttctctaactcaagaactagaatataaaggtgaaagtttaatgagcagcctgctgctgaggaacttctggctctacagattatattcagtggatttaaaagatcattctttgtgtggaaagcagctctacagatccttaataaaagtgttaaaacatttgaagaggtgcttcaacctggagaaccttggggaatgtttggaattatttttaaatgtgcccatgcagtttggaggtgctgacccaaatgtcatctacaggagcttctacagaagaactccagattttctaacagaaagtataactcatctcatcctcattttaaaacattttagaagagatttggaattcaacaaagataatgtctccaaagctgttctttctttgctagagttcaccaagaatgattctgcagaatttgtaactttgatgagagatcctcaagcaattggtagtgagaggcaggccaagatcacttcagacatcaacagaacagctgtaacttcagtgttatcaaatgctccaaatgaaatatttagaacttcagctcttcattacagcagcacagaaaatgaattaaatggaatagcaagtggagtttctcctgtttatcctcatggtcttcgagttttatatgaaagtttacctttttataaagcagagaagattgtcaacatggtttctgggaccaagtccatcaccaacatactggagaagacatcagccatctcctacacagatataattcgagccaccaacatgatggtggagaacctcactttgctaacaagaataatgaaaccaggtgctgacacatctttggatcctgacacaatagtaataacaatattatcaaaaataataagagataaatcctgggatgttggtgatataattggtgtcacttccccatctcctgtctcctgcttcaaggtggtctacacatcaactctacaaaataattcagtagtaatagaaagatacacaacagacacctacacaagaggtaagagaggccccaccaagccctgggtgggcagcagcacacaggagaagaagtccatgcctgtctacaacagacaagttttaacaagaggacaaagagatcaaatagaaaatatagcaaagctggagtgggtgttttcttcagtagcaaatattgattctttgctaaatgagctcagcaccatgactttgggtctttctctaaggaaatgtagacaactttttccaacatatttaagtttaaacttcctgcacaggctttctgtcagcagcaggcccagagaatatccttcttctcttcctgcctacaggacaacaaattttcattttgatactggaccaataaataaagtgttaacagaaagatttggagatgaagatataaatttggtatttcaaaatgcaatatcatatggtctttccaccatgtctttggtggagcagtttactggtgtctgtccaaataaagttttgctggtgcccaagctacaagaaatacaactaatgaaagttccaatatttcaaggtggcttcaacctacaaagtataattccaataataaggcagcagcacatgttcctgcccaaccacatcactccagcccagtatattgaattatttctttcttcaaaacaatttcattcaagaataaatttaaaacacaacaacagatttaaacttgttttacaaaaagattattttaatggggagaacatgatagaaactttgtccacctgtttggcaggccactggatcatcattttgatgctaatgaaggagagtcaggggatatttgacaaggagtggtatgatggttttgtaacagaccacatgttcctggacctgcagctcttcctctcctccttcaagacatttctaactgtcttcaactttgcttatttaaaagttggttcaaatatagaagaaataacaggaaatcaagccaacctgctggagctgctggacctgggctactggaagaacatgtataaagtattttcagagaccaaggtgcggctggctttgctaaaacaagatttatcatttaattctgtgaagaacagcagcagcttccggcactggtttataaattctctacaagaagtacaatgtacttctgtgccttgggtggtaaatgtaacaagaaatccaactcatttaaaaggtgttctacagtacatgaagatgatagaaagtggcatgattcaaggttattcagcaaatatttcttcagttttaagtatcccatataattatccagacatggcgcacatgatgacaaaaataataagaaatcgaggccacatgtcctatgattatccaaagatgaagaaaagtttaactttctccatgacagacatgagtgacagctacatgctcaacctcttccccaaagtagaatgttcttacatgagtggttatttggataaactagatgatactctacaacttctaaagaaacctcctgttggaagaaaagttccttctgtggctttgccctggcaccactgcaacagatacaactttgtcttcagcagcacaggctgcaaagtttctgtcattgacatgcttccaaaacatttccgaagaagtaatttaaaagtaatatgttttattggagaaggggcgggcaacctcatgctaagagctgttttggaagttggtggaaatataaaattaatatatagatccttaaaagatcctgatgatcatcatgttcctgtagaatttctaagattaaaaccttgttatccttatattgatactggtggcagtttatctttggcttcaacagatgccaccaacaaggcccactgggattatttacatcttcactggacagatcctttaaatttaatagtatgtgatgcagaaataagtggtgtgaagcactggctaaaaattcttcacaggtggtatgagcacatgacttcctgcaagcactgtttaaaatcagaacatgataaatatttaataataaaatatcatgctcaagatgatttaatagatcttcctcatggtgtcaggctactaaaatgtaacatctgcctgggctccaaactaagtggcagtgagagctacctgctcattggtcttggtctttcaaataaacttcctgtctacagtgaagttcttcattcaaaacttcttttggcagaatgtcatcagtttcatcatccaaaatatttggatgtttctggaataaatacaaatataaaatccttaataccaatgttggattatccaataacttacaacaagatcaccactttgctagaaagtgtgcgggagctttcttcaaataaaaacaagaacaccatgtggattggaagaaatcctgtctaccataataaatggctaaagaggaaatatttcaacattttaaaatggctaaaatactgtatagaacttcctgccttcaggatggattataattcatttgagagaatagaaatgctttatccaaatttaagagatttggtagattctgtttctacttcagagctgaagaaagtaataaaagtaacaggcatcctcttcaggagcaacaccatgtgaattaatatgccaatgctaacatgtcatccccactactttttttgttcaatcactctcagtctagacatgtgagaagatcccaaacccaactgcacccctcccactcgaaatcagttgtagcctcagcagctccatctgccatgatctctgaccagcagcaaatgtattattattttaatttgtctatagttaacaaaaaattgatatctcacaggttgtaaacatagttcttttataattattgttagttaaactattgtgtttgacttcctttgggtatttttttcccgt

SEQ ID NO: 22 - DNA, 21750 bp, synthetic construct
  source 1..21750: mol_type = other DNA
acgcgaaaaaatgcataacaaaactatcaacctgaaaaaagttaggacaagtgaagattgctagtcccaaagaccagaatcatgggctgtaatgtgatgatggagcttgattatggtggacgagctgcatggctggcattccacataaccaactttgataggtcagatttggaaactatcctaagaggtgctagggtgtgcaatacatggcaagatcagagactctccgtgtaccttgtgggaagggattgcaatttgttaagaccatttgtgcaagctgccaaatttatccataatactaggagaggccaaacattaacacattggttcacaaaaaatatcgtgtttagttctacagggcaagagacagagcctcccattgaccccacatgtgagctgttggtagagctgatcagtggttaagatgacagcacattatgtagttaattaaaacaaagggtaggacaagtcctaatgtccacagctatgaacaagttcactcagaccatctctaaacctgccactatcttgaatatttcagacagtgaagagtcgggcgatgaggcaggggtgggcaaggtgtcccgtaccacacagagctcagagaggtggcttgatttgctcattgaaaagttccagccgagcctacaaaacatcactagatacatcaactggaacttcatcaggatctgcaatgataggcttaaaaaagaaaaaatggggtacattgaggccaagcaatatgtggaagacatggcttggatggtgatagcatctgaggcagacagcattgagtggaagtgcataaggaggcaggagaaagtgactggggtgaaatacccaaagttcttctttgtacaacacaaagaggactggattgagtgcacaggatgcattccgtacccaggccatgacttgatctatgatgaggatgatgatgactgagctgactcagatcactccaaccagcagagagatccaccacctatagcaagtgatgtagtatttagtctatgattagttatagaaaaacattaggataaatacacatcctaggccgggccaaaatgtctctagacagattgaagctcaatgatgtctcaaacaaggatagcctgctgtccaactgcaaatacagtgttaccagatccacaggcgatgtaaccagtgtgtctggtcatgctatgcagaaagcccttgcaaggacactcggcatgttcttacttactgccttcaaccgttgcgaagaagtggcagaaatagggctccaatatgccatgtccttgctaggcagagatgatagcatcaagatattaagagaagccggctacaatgtaaaatgtgtggacacacagctcaaggactttacaatcaaattacaaggaaaggaatacaaaatacaagtcctagatatagtgggaatagatgcagccaatttagctgatctagagatacaagccagaggagtggtagcaaaagaactcaaaacaggagccaggctacctgacaatcggaggcatgatgcaccagattgtggtgtgatagttctctgtattgcagcattagttgtttccaaattagctgcaggggacaggggaggacttgatgctgtggaaagaagggctttaaatgtgctgaaagccgagaaagccaggtaccccaacatggaggtcaagcagatagctgaaagtttttatgatctgtttgaaaggaagccttattacattgatgtcttcatcacttttggcctggcccagtctagtgtcaagggaggcagcaaagttgaggggctgttttcaggtctcttcatgaatgcatacggggcaggacaagttatgctgaggtggggtttactggcaaaatctgtcaagaacatcatgctaggccatgctagtgtacaagctgagatggaacaggtggttgaggtttacgaatatgctcagaagcaaggaggggaggcaggattctatcacatcagaaataatccaaaagcttcacttctctctttgaccaattgtcctaatttcaccagtgttgtgcttggcaatgctgcaggtttaggcatcatagggtcatataagggtgctcctaggaatagagaactctttgatgctgccaaagattatgcagaaagattaaaggacaacaatgtaattaactacagtgcattaaacttgactgcagaagaaagagagctgatcagccagcagctgaacattgttgatgacactcctgatgatgatatttaattaaaactggaaaatgtaggataaatagccgccaccatgttcgtgtttctggtgctgctgcctctggtgagctcccagtgcgtgaacctgaccacaaggacccagctgccccctgcctataccaattccttcacacggggcgtgtactatcccgacaaggtgtttagatctagcgtgctgcactccacacaggatctgtttctgcctttcttttctaacgtgacctggttccacgccatccacgtgagcggcaccaatggcacaaagcggttcgacaatccagtgctgccctttaacgatggcgtgtacttcgcctccaccgagaagtctaacatcatcagaggctggatctttggcaccacactggacagcaagacacagtccctgctgatcgtgaacaatgccaccaacgtggtcatcaaggtgtgcgagttccagttttgtaatgatccattcctgggcgtgtactatcacaagaacaataagtcttggatggagagcgagtttcgcgtgtattcctctgccaacaattgcacatttgagtacgtgtcccagcccttcctgatggacctggagggcaagcagggcaatttcaagaacctgagggagttcgtgtttaagaatatcgatggctacttcaagatctactccaagcacaccccaatcaacctggtgcgcgacctgccacagggcttctctgccctggagccactggtggatctgcccatcggcatcaacatcacccggtttcagacactgctggccctgcacagaagctacctgacaccaggcgacagctcctctggatggaccgcaggagctgccgcctactatgtgggctatctgcagcccaggaccttcctgctgaagtacaacgagaatggcaccatcacagacgccgtggattgcgccctggatcccctgtctgagaccaagtgtacactgaagagctttaccgtggagaagggcatctatcagacaagcaatttcagggtgcagcctaccgagtccatcgtgcgctttcccaatatcacaaacctgtgcccttttggcgaggtgttcaacgcaacccgcttcgccagcgtgtacgcctggaataggaagcgcatctccaactgcgtggccgactattctgtgctgtacaacagcgcctccttctctacctttaagtgctatggcgtgagccccacaaagctgaatgacctgtgctttaccaacgtgtacgccgattccttcgtgatcaggggcgacgaggtgcgccagatcgcccctggccagacaggcaagatcgccgactacaattataagctgcctgacgatttcaccggctgcgtgatcgcctggaactctaacaatctggatagcaaagtgggcggcaactacaattatctgtaccggctgtttagaaagtctaatctgaagccattcgagagggacatctccacagagatctaccaggccggctctaccccctgcaatggcgtggagggctttaactgttatttccctctgcagagctacggcttccagccaacaaacggcgtgggctatcagccctaccgcgtggtggtgctgtcttttgagctgctgcacgcacctgcaacagtgtgcggaccaaagaagagcaccaatctggtgaagaacaagtgcgtgaacttcaacttcaacggactgaccggcacaggcgtgctgaccgagtccaacaagaagttcctgccttttcagcagttcggcagggacatcgcagataccacagacgccgtgcgcgaccctcagaccctggagatcctggatatcacaccatgctccttcggcggcgtgtctgtgatcacaccaggcaccaatacaagcaaccaggtggccgtgctgtatcaggacgtgaattgtaccgaggtgcccgtggcaatccacgcagatcagctgacccctacatggcgggtgtactctaccggcagcaacgtgttccagacaagagccggatgcctgatcggagccgagcacgtgaacaatagctatgagtgcgacatccctatcggcgccggcatctgtgcctcctaccagacccagacaaactccccagggtctgcctcctctgtggccagccagtccatcatcgcctataccatgagcctgggcgccgagaattccgtggcctactccaacaattctatcgccatccctaccaacttcacaatctccgtgaccacagagatcctgccagtgagcatgaccaagacatccgtggactgcacaatgtatatctgtggcgattccaccgagtgctctaacctgctgctgcagtacggctctttttgtacccagctgaatagagccctgacaggcatcgccgtggagcaggacaagaacacacaggaggtgttcgcccaggtgaagcagatctacaagaccccacccatcaaggactttggcggcttcaacttcagccagatcctgcccgatcctagcaagccatccaagcggtcttttatcgaggacctgctgttcaacaaggtgaccctggccgatgccggcttcatcaagcagtatggcgattgcctgggcgacatcgccgccagagacctgatctgtgcccagaagtttaatggcctgaccgtgctgcctccactgctgacagatgagatgatcgcccagtacacatctgccctgctggccggcaccatcacaagcggatggaccttcggcgcaggagccgccctgcagatcccctttgccatgcagatggcctatcggttcaacggcatcggcgtgacccagaatgtgctgtacgagaaccagaagctgatcgccaatcagtttaactccgccatcggcaagatccaggactctctgagctccacagccagcgccctgggcaagctgcaggatgtggtgaatcagaacgcccaggccctgaataccctggtgaagcagctgtctagcaacttcggcgccatctcctctgtgctgaatgatatcctgagcaggctggaccctccagaggcagaggtgcagatcgaccggctgatcacaggcagactgcagtccctgcagacctacgtgacacagcagctgatcagggcagcagagatcagggcctctgccaatctggccgccaccaagatgagcgagtgcgtgctgggccagtccaagagagtggacttttgtggcaagggctatcacctgatgagcttcccacagtccgcccctcacggagtggtgtttctgcacgtgacctacgtgccagcccaggagaagaacttcaccacagcaccagcaatctgccacgatggcaaggcacactttcctagggagggcgtgttcgtgagcaacggcacccactggtttgtgacacagcgcaatttctacgagccacagatcatcaccacagacaatacattcgtgtccggcaactgtgacgtggtcatcggcatcgtgaacaataccgtgtatgatcctctgcagccagagctggactcttttaaggaggagctggataagtacttcaagaatcacaccagccccgacgtggatctgggcgacatctctggcatcaatgccagcgtggtgaacatccagaaggagatcgacaggctgaacgaggtggccaagaatctgaacgagtccctgatcgatctgcaggagctgggcaagtatgagcagtacatcaagtggccctggtatatctggctgggcttcatcgccggcctgatcgccatcgtgatggtgaccatcatgctgtgctgtatgacaagctgctgttcctgcctgaagggctgctgttcttgtggcagctgctgtaagtttgatgaggacgatagcgagcctgtgctgaagggcgtgaagctgcactacacctgatagtatttaattaaaactggaaaatgtaggataaatatggagaaattcgcccccgaatttgttggcgaggatgctaacaagaaggcagaggagtttctcaaacatagatccttcccttcggaaaaaccactagctggtataccgaacactgccactcatgtcaccaaatataacatgccccctatattgcgtagctcattcaaactcccttccccgagagttgctgcaaatcttactgaaccctctgctccccctaccactccaccacccacacctccccagaacaaggaagagcagcccaaagagtctgatgttgacattgagactatgcatgtctgtaaggttcctgacaatccggaacacagcaagaagccatgctgctcagatgataccgatactaagaaaactaggaagccgatggtcacctttgtggaacccgaggagaaatttgtcggattgggagctagcttgtacagggagaccatgcagacctttgctgctgatggttatgatgaagaaagcaacctatcgtttgaggagactaaccaagagccgggttcttcatctgtagaacaaagactagatagaatagaggagaaattgtcctacataataggccttttaaacaccataatggtagcgactgctggacctaccactgctagagatgagattagagatgcccttataggcactagagaagaacttattgagatgatcaagtctgacatcttgactgtcaatgacagaatagtggccatggagaagctcagagatgaggaatgctccagagctgacactgatgatggatcagcctgttatttaacagacagagcaaggatactagataagatagtgtccagcaatgctgaagaggctaaggaagatttggatgttgatgacatcatgggcattaatttttagttaattaaaataacaacaggacaaataatggaggcctacttggtagagatgtaccatggtgtcccatatacagctgcagtacagctaaacttggttgaaaaacattcagccaacatatcactaactgtgtggataccgatgtttcaaacatctctaccaaagaactccgttatggacctgctacatgatgttacagtcatttgtacacagatatcaacagtgcatggtcccatgatcaaggtagatctgagctcttccaatgcaggtttagctaccatgccaaggcaattcttgataaatgctatcatagctttggatgactggggcaacatggattacgaagtgcctgttgcttttgataaaaagagcttctgtgtgacaattcttaagcctaaaaacatgctttacactgtacccagcattactcccactaatcgacctactcatgagctgatagctgtctgctctttccataacagggtaacattaaagtcattcaatatacctgtcttcatcagagcactgtctatcagacagcaggaccttgatagtgtggagcaggctataagctccgatgtggaccatgctataacaacagctagggtggctccctatgcagggcttacacttgtgatcaacatcacatccaccaaaggagcattcaaactgctaaaggcaggtagtcagattcttgcagaactgggtccctatctgacgcaggtgagcctacatgatgtgattatgaactggaaacatacaggcacttcctacatactcaagagctcctcaacaagtggatgaaaaagagaaagtcaccattgatcagctcaatccacaactacaaccccacgatttcacacagcacaacaaccaccgccaccaacatccacatgacaaccacacatacacacccacatacatatatacacatatcttagttaaataaaatcaggataaataatggatcctaacatgacctcacaccagatcaccctcgagatcaacatgaccagcagccgtattggcacatacactacaccagccccaacagctcttctccttgcatgtgccgtcatcaacacagtgtgtgcgctgataatggcctgcagcagtagaagcactgccacatcaggcattgtcagcagccaatgcacagttcatcccaatcaccctccaccaagttatggcgtcaatgtaactggtctgccgggtaacctatactcaaggaacactacataacattataaataacagaaattatccttcaataaaccccaggccagacagctttaccctgctagacgattcaatcagcccttgcagtatgtcgtctagttaacaaaaaaccggtaggataagtactatcctattggaaccaaacgagacctgtagagcagctcacacaagagaaccacaagctgacttcacctagtatgggaaggaacttagaagtgagtggcagcattaccaatttgaactttgagagaactcagcatcctgacacatttaggactgttgtaaaagtgaaccaaatgtgtaagcttattgcaggtgtgctcacaagtgctgctgtggcagtttgtgtgggggtcataatgtattctgttttcacatcaaaccacaaggccaactccacgcagaatgccacgacccggaacagcacatccacccctccccaaccaaccgccggtctgcccaccacagagcaagggaccatccccagattcaccaaaccccccaccaaaaccgccacccaccatgagatcacagagcccgtcaaaatggcaacaccttcagaggatccctaccaatgctccagcaatggttatttggaccgacctgatttacctgaaaatttcaaactcgtattggatgttatatgcaagcctccaggtcctgaacatcacaacaccagctgttatgagaaacgtgaaatcaacccaggaagtgtttgccctgatcttgtaacaatgaaggcaaacatgggcttaaacaatggtggtggggaggatgctgcaccttatatagaggttaccaccctttctacgtactccaacaaaagggcaatgtgtgtccacaatgggtgtgatcaaggcttctgtttcttcctttctggtttaagcactgatcaggagagagctgtgctagagcttggaggtcaacaggctatcatggagttgcattatgattcctactggaaacactattggagtaactctaattgtgttgttcccagaacaaactgcaacctgacagaccaaactgagattttgtttcctaggtttaacaacaagaatcagtctcagtgtaccacctgtgcagattcagctggcctagataacaaattttatctcacatgtgatgggcttttaagaaccctccctctagttggactacccagcctaagtcctcaggcttacaaagctgtacccacacaaactacaggcaccaccacggcaccaacatcagagacgaggcacccaacccctgcacccaggaggtccaaacctctcagtcggaagaagagagctttatgtggtgtagactcaagcagagaacccaaaccaacaatgccttactggtgtcctatgctccaattatttccaaggaggtctaattcttaagtgacctattcctgaattaacttcagaataagtaccaaccttatcagtagttaatgaaaactaagctttgatataataggacaaatatgattcctggcaggatctttctagtccttctggtgatcttcaacaccaagccaattcacccaaatacattaacagaaaaattctatgagtccacatgtagtgttgagactgcaggttataagagtgcccttagaacaggttggcatatgacagttatgtcaattaagttgtctcaaataaatattgagtcatgcaagagcagcaactcgttattggctcatgagcttgcaatctatagtagtgcagtggatgaattgagaacgttatcatccaatgccttgaagtccaaaaggaagaagaggttcctcggtttgattcttggtctcggagctgcagtcactgccggggtggctttagccaagacagtgcaacttgaaagtgagattgcattgattagagatgcagtgagaaatacaaatgaggctgttgttagcctaaccaacggcatgtcagtgttggctaaagtggtggatgatttgaaaaacttcatatctaaagaattactcccaaaaataaaccgagtctcttgtgatgtgcacgacatcactgccgtcattagattccaacagctcaacaaaagacttttggaagtatctcgtgaattttcatctaatgcaggattaacacacactgtttcatcttttatgttaacagaccgggaactcacctccattgtaggcggcatggctgtttcagcaggccaaaaagagataatgctatctagcaaagctataatgagaagaaatgggttagcaatattaagttcagtcaacgctgacacactggtttatgtaatacaactcccattatttggtgttatggacacagattgttgggtaataagaagttctatagactgtcataacatagcagacaagtatgcttgtttggctagagctgataatggctggtattgtcacaatgctggctcattatcatacttcccgtcgccaacggattgtgagatccacaatgggtatgctttctgtgacactctaaaaagtctaactgtacctgtaacatcacgagaatgcaactcaaacatgtataccactaactacgattgtaagatttccacaagtaaaacttatgtgagtacagcggtactgactacaatgggttgcttggtatcttgttatggtcataacagttgcacagtcatcaataatgacaaaggtataataaggactctgccagatggttgccactacatctccaacaaaggtgtggacagggttcaagtaggtaacactgtttactatcttagcaaagaagttggcaagtcaattgttgtcagaggggaaccattggtcttgaaatatgaccctttgagtttccctgacgataaatttgatgttgctataagagatgtggagcatagcatcaatcagacacgcacattcttgaaggcctctgatcagttattggacttaagtgaaaacagagagaataaaaatttaaacaagtcatatatactaacaactctgctcttcgttgtaatgcttattataataatggctgtcatagggttcattctgtataaggtattgaaaatgatcagagacaacaagttgaaatccaaaagtacacctggcctcacagttttatcatgacaattgtaccaaaccataattgagttagttaattaaaaacttaggataagtgacaatccagacccaacacctctttcaactctcaaggataaggtaggatgagtgtgagaccttgcaaatttgaggttcaagggttttgttccagagggaggaattgcaagtatagtcataaatattgggaatggcctttgaaaactcttatgctcaggcagaactacatgcttaataggatttataggttcctcgacaccaacacagatgcaatgtcagatgtcagcggatttgatgcaccacaaaggactgctgagtatgccttgggaaccataggtgtgctgaaaagttacctggaaaaaactaacaacatcactaaatcaatagcttgtggcagtttgatcactgtattgcagaacttggatgttggtctagtaatacaagcaagagatagcaacactgaggacaccaattacttgagaagttgcaacactatactgtcttatatagacaagatacacaagaagagacaaattattcacattctcaaaagactgccagtaggagtactatgcaatctgatccaatctgtcatctccatcgaggagaagataaattcttctatgaaaacagaatgataaggctgcctaaatactatccagccatactgcataagatgtatattattagagtaaatagaaacctcacttacgatgggtctggaccatccacaataatagatgcaggaaagtctgtggtgtggaatcgtgttgatgtgatagcttgtgtgaaagaggccttgtgctgcatagaattcagctggaataaccaagtgatcatagactttgattatagccaggccagatgatgtggactgtattcctttttttgtcagtaatcagttattaacccaaaattgttaattatgtagactttaagttaactaacttcatgttaattcaatagttatataaaaaaatattcgaattaggatcaatatggatcctattgatgaacaagaagttaatgtgtacttgccggatagctacttaaagggtgttatatcttttagtgaaactaatgctcttggcagctgtatcattggtagacctttcttgaaggatgactttactgccactacttcaatccgtaaccccctaattgaacataaaagaataagggacactaaattagtaaaaaatattgtttcaaaccctcaatataggttagtggagcctctccaaatgcagcatgagctcttgagtgtactatcgcccaatttcatattgcacactgccaacttaaggaaaattatacaaagaagtgttgacataacagataaaaagttgaaccccattttgcacattttgaatcttaattctcctaaccaagagggtaaggtgtcggaacggctaactaggctaattaagaaacatctctctcacatacctaattgggtaagcagctggtacaatatatgggtcaatcttaacaacttactgcaggagtaccgttcaaaggaagttatagaccataactgtgttctgactaggcaattgtctggaagtttcatacatgtggtcatgagtcaatatggagttgtgataattagcaaaaaaagtaaaagatatacaatgtgtacttataaccaattcctaacctggaaggaccttgccttgagcagatttaatgccaattatgtggtctggctaagtaatgtgttaaacacactcaacgaggggttgggattaaggtgtagattaaaaggtcatctgctcagtaagttgtacatttccactgacatctttttatcttcaacatctaatgaattttataatgtggtcaaggaatttgagggcttcatcatgtcactgatattgaaacaaactgaggaagccttatttagcacaaggttttataataacatgttgaacaacttaattgatgccattgatagggctcgactagagtatctggcccgctgtgccaattcagctgccaggattaatttacctagtacagatgttatgatagcatcattgggtgatatcttatctttgataaacgttttaggtgaatccaaccttaacaacttaagtgagttatattttatcttcaggatatttggtcaccctatggttgatgagaggaaggccatggatgcagtcagagataactgttgtgaaacaaagtttctgacggctaagaaccttgcatcgttaagaggagcatatgtttatagaattatcaaaggattcgtagcaaattataacaggtggccttacataaaaactagagtttgccttacaccaacatggattaactatcttgacaccaattcatgtccctcattattagagatgacagaagatgattttattgtgttagctggagtgcactttataagagaattccacatcccaaagctaactgatctggagattatattaaatgacaaggccatatctcctccaaaatcactcatttggtcatgctttccaaaaaactacatacctcaggttatacaagatgagtatgcccggaggtattgtagagctaaagcacctttgaagacaagacgtgtcttggagttctacttacaggacaaggatttcaagttggatcagctccatagagtagtagtgaaccaggactaccttaatgataaagaacatataatttctttaacaggaaaagaaagagagttgggtgttggtaggatgtttgccatgcaacctgggaagcagaggcaagtccaaattttagcagagaagctgttggctgataacatcctgcaattctttccggagacactgactagatacggtgatttggagctgcaaaagatactagagttaaaagctggactttcaaataaaaatgacagatctaaagactcctacaataattatataagtaggtgctcattaattactgatttaagtaaatttaaccaagcttttaggtacgagtcatcctgtgtgtgtagtgatcttttagatgagctacatgggactcaaagcttattctcttggctgcatttaacagtaccactgactactataatgtgtacatataggcatgcgccgccggacactggaaacaactataatgtagatgatattgctgagcagagtggactctaccgctaccacatgggcgggattgagggctggtgccagaagctctggacaacagaggccattgctttgctagatactgtagctgtgaagggccgtttccagctaacttcattaataaatggcgacaaccaaagtattgatatttcaaaaccaacaaggctggggaccaggactcaaagtgaagcagattatgatttggcaataaattctttaagattaatatcagcagcttataaaggcattggacataaattaaaagaaggtgagacctacttgtcacgtgacatgcagttcatgagtaaaacaatacaacatgaaggggtctactacccggcctccatcaagaaaatattaagagttggtccctggatcaacacaatattagatgatataaaaacttcaacagaaagtattggttctctaactcaagaactagaatataaaggtgaaagtttaatgagcagcctgctgctgaggaacttctggctctacagattatattcagtggatttaaaagatcattctttgtgtggaaagcagctctacagatccttaataaaagtgttaaaacatttgaagaggtgcttcaacctggagaaccttggggaatgtttggaattatttttaaatgtgcccatgcagtttggaggtgctgacccaaatgtcatctacaggagcttctacagaagaactccagattttctaacagaaagtataactcatctcatcctcattttaaaacattttagaagagatttggaattcaacaaagataatgtctccaaagctgttctttctttgctagagttcaccaagaatgattctgcagaatttgtaactttgatgagagatcctcaagcaattggtagtgagaggcaggccaagatcacttcagacatcaacagaacagctgtaacttcagtgttatcaaatgctccaaatgaaatatttagaacttcagctcttcattacagcagcacagaaaatgaattaaatggaatagcaagtggagtttctcctgtttatcctcatggtcttcgagttttatatgaaagtttacctttttataaagcagagaagattgtcaacatggtttctgggaccaagtccatcaccaacatactggagaagacatcagccatctcctacacagatataattcgagccaccaacatgatggtggagaacctcactttgctaacaagaataatgaaaccaggtgctgacacatctttggatcctgacacaatagtaataacaatattatcaaaaataataagagataaatcctgggatgttggtgatataattggtgtcacttccccatctcctgtctcctgcttcaaggtggtctacacatcaactctacaaaataattcagtagtaatagaaagatacacaacagacacctacacaagaggtaagagaggccccaccaagccctgggtgggcagcagcacacaggagaagaagtccatgcctgtctacaacagacaagttttaacaagaggacaaagagatcaaatagaaaatatagcaaagctggagtgggtgttttcttcagtagcaaatattgattctttgctaaatgagctcagcaccatgactttgggtctttctctaaggaaatgtagacaactttttccaacatatttaagtttaaacttcctgcacaggctttctgtcagcagcaggcccagagaatatccttcttctcttcctgcctacaggacaacaaattttcattttgatactggaccaataaataaagtgttaacagaaagatttggagatgaagatataaatttggtatttcaaaatgcaatatcatatggtctttccaccatgtctttggtggagcagtttactggtgtctgtccaaataaagttttgctggtgcccaagctacaagaaatacaactaatgaaagttccaatatttcaaggtggcttcaacctacaaagtataattccaataataaggcagcagcacatgttcctgcccaaccacatcactccagcccagtatattgaattatttctttcttcaaaacaatttcattcaagaataaatttaaaacacaacaacagatttaaacttgttttacaaaaagattattttaatggggagaacatgatagaaactttgtccacctgtttggcaggccactggatcatcattttgatgctaatgaaggagagtcaggggatatttgacaaggagtggtatgatggttttgtaacagaccacatgttcctggacctgcagctcttcctctcctccttcaagacatttctaactgtcttcaactttgcttatttaaaagttggttcaaatatagaagaaataacaggaaatcaagccaacctgctggagctgctggacctgggctactggaagaacatgtataaagtattttcagagaccaaggtgcggctggctttgctaaaacaagatttatcatttaattctgtgaagaacagcagcagcttccggcactggtttataaattctctacaagaagtacaatgtacttctgtgccttgggtggtaaatgtaacaagaaatccaactcatttaaaaggtgttctacagtacatgaagatgatagaaagtggcatgattcaaggttattcagcaaatatttcttcagttttaagtatcccatataattatccagacatggcgcacatgatgacaaaaataataagaaatcgaggccacatgtcctatgattatccaaagatgaagaaaagtttaactttctccatgacagacatgagtgacagctacatgctcaacctcttccccaaagtagaatgttcttacatgagtggttatttggataaactagatgatactctacaacttctaaagaaacctcctgttggaagaaaagttccttctgtggctttgccctggcaccactgcaacagatacaactttgtcttcagcagcacaggctgcaaagtttctgtcattgacatgcttccaaaacatttccgaagaagtaatttaaaagtaatatgttttattggagaaggggcgggcaacctcatgctaagagctgttttggaagttggtggaaatataaaattaatatatagatccttaaaagatcctgatgatcatcatgttcctgtagaatttctaagattaaaaccttgttatccttatattgatactggtggcagtttatctttggcttcaacagatgccaccaacaaggcccactgggattatttacatcttcactggacagatcctttaaatttaatagtatgtgatgcagaaataagtggtgtgaagcactggctaaaaattcttcacaggtggtatgagcacatgacttcctgcaagcactgtttaaaatcagaacatgataaatatttaataataaaatatcatgctcaagatgatttaatagatcttcctcatggtgtcaggctactaaaatgtaacatctgcctgggctccaaactaagtggcagtgagagctacctgctcattggtcttggtctttcaaataaacttcctgtctacagtgaagttcttcattcaaaacttcttttggcagaatgtcatcagtttcatcatccaaaatatttggatgtttctggaataaatacaaatataaaatccttaataccaatgttggattatccaataacttacaacaagatcaccactttgctagaaagtgtgcgggagctttcttcaaataaaaacaagaacaccatgtggattggaagaaatcctgtctaccataataaatggctaaagaggaaatatttcaacattttaaaatggctaaaatactgtatagaacttcctgccttcaggatggattataattcatttgagagaatagaaatgctttatccaaatttaagagatttggtagattctgtttctacttcagagctgaagaaagtaataaaagtaacaggcatcctcttcaggagcaacaccatgtgaattaatatgccaatgctaacatgtcatccccactactttttttgttcaatcactctcagtctagacatgtgagaagatcccaaacccaactgcacccctcccactcgaaatcagttgtagcctcagcagctccatctgccatgatctctgaccagcagcaaatgtattattattttaatttgtctatagttaacaaaaaattgatatctcacaggttgtaaacatagttcttttataattattgttagttaaactattgtgtttgacttcctttgggtatttttttcccgtgggtcggcatggcatctccacctcctcgcggtccgacctgggcatccgaaggaggacgcacgtccactcggatggctaagggagagcctgcagtagcataaccccttggggcctctaaacgggtcttgaggggttttttgctgaaaggaggaactatatacgcgtcgacgggcccgcgctcactggccgtcgttttacaacgtcgtgactgggaaaaccctggcgttacccaacttaatcgccttgcagcacatccccctttcgccagctggcgtaatagcgaagaggcccgcaccgatcgcccttcccaacagttgcgcagcctgaatggcgaatgggacgcgccctgtagcggcgcattaagcgcggcgggtgtggtggttacgcgcagcgtgaccgctacacttgccagcgccctagcgcccgctcctttcgctttcttcccttcctttctcgccacgttcgccggctttccccgtcaagctctaaatcgggggctccctttagggttccgatttagtgctttacggcacctcgaccccaaaaaacttgattagggtgatggttcacgtagtgggccatcgccctgatagacggtttttcgccctttgacgttggagtccacgttctttaatagtggactcttgttccaaactggaacaacactcaaccctatctcggtctattcttttgatttataagggattttgccgatttcggcctattggttaaaaaatgagctgatttaacaaaaatttaacgcgaattttaacaaaatattaacgcttacaatttaggtggcacttttcggggaaatgtgcgcggaacccctatttgtttatttttctaaatacattcaaatatgtatccgctcatgagacaataaccctgataaatgcttcaataatattgaaaaaggaagagtatgagtattcaacatttccgtgtcgcccttattcccttttttgcggcattttgccttcctgtttttgctcacccagaaacgctggtgaaagtaaaagatgctgaagatcagttgggtgcacgagtgggttacatcgaactggatctcaacagcggtaagatccttgagagttttcgccccgaagaacgttttccaatgatgagcacttttaaagttctgctatgtggcgcggtattatcccgtattgacgccgggcaagagcaactcggtcgccgcatacactattctcagaatgacttggttgagtactcaccagtcacagaaaagcatcttacggatggcatgacagtaagagaattatgcagtgctgccataaccatgagtgataacactgcggccaacttacttctgacaacgatcggaggaccgaaggagctaaccgcttttttgcacaacatgggggatcatgtaactcgccttgatcgttgggaaccggagctgaatgaagccataccaaacgacgagcgtgacaccacgatgcctgtagcaatggcaacaacgttgcgcaaactattaactggcgaactacttactctagcttcccggcaacaattaatagactggatggaggcggataaagttgcaggaccacttctgcgctcggcccttccggctggctggtttattgctgataaatctggagccggtgagcgtgggtctcgcggtatcattgcagcactggggccagatggtaagccctcccgtatcgtagttatctacacgacggggagtcaggcaactatggatgaacgaaatagacagatcgctgagataggtgcctcactgattaagcattggtaactgtcagaccaagtttactcatatatactttagattgatttaaaacttcatttttaatttaaaaggatctaggtgaagatcctttttgataatctcatgaccaaaatcccttaacgtgagttttcgttccactgagcgtcagaccccgtagaaaagatcaaaggatcttcttgagatcctttttttctgcgcgtaatctgctgcttgcaaacaaaaaaaccaccgctaccagcggtggtttgtttgccggatcaagagctaccaactctttttccgaaggtaactggcttcagcagagcgcagataccaaatactgtccttctagtgtagccgtagttaggccaccacttcaagaactctgtagcaccgcctacatacctcgctctgctaatcctgttaccagtggctgctgccagtggcgataagtcgtgtcttaccgggttggactcaagacgatagttaccggataaggcgcagcggtcgggctgaacggggggttcgtgcacacagcccagcttggagcgaacgacctacaccgaactgagatacctacagcgtgagctatgagaaagcgccacgcttcccgaagggagaaaggcggacaggtatccggtaagcggcagggtcggaacaggagagcgcacgagggagcttccagggggaaacgcctggtatctttatagtcctgtcgggtttcgccacctctgacttgagcgtcgatttttgtgatgctcgtcaggggggcggagcctatggaaaaacgccagcaacgcggcctttttacggttcctggccttttgctggccttttgctcacatgttctttcctgcgttatcccctgattctgtggataaccgtattaccgcctttgagtgagctgataccgctcgccgcagccgaacgaccgagcgcagcgagtcagtgagcgaggaagcggaagagcgcccaatacgcaaaccgcctctccccgcgcgttggccgattcattaatgcagctggcacgacaggtttcccgactggaaagcgggcagtgagcgcaacgcaattaatgtgagttagctcactcattaggcaccccaggctttacactttatgcttccggctcgtatgttgtgtggaattgtgagcggataacaatttcacacaggaaacagctatgaccatgattacgccaagcgcgcccgggtaatacgactcactataggg

SEQ ID NO: 23 - DNA, 18713 bp, synthetic construct
  source 1..18713: mol_type = other DNA
acgcgaaaaaatgcataacaaaactatcaacctgaaaaaagttaggacaagtgaagattgctagtcccaaagaccagaatcatgggctgtaatgtgatgatggagcttgattatggtggacgagctgcatggctggcattccacataaccaactttgataggtcagatttggaaactatcctaagaggtgctagggtgtgcaatacatggcaagatcagagactctccgtgtaccttgtgggaagggattgcaatttgttaagaccatttgtgcaagctgccaaatttatccataatactaggagaggccaaacattaacacattggttcacaaaaaatatcgtgtttagttctacagggcaagagacagagcctcccattgaccccacatgtgagctgttggtagagctgatcagtggttaagatgacagcacattatgtagttaattaaaacaaagggtaggacaagtcctaatgtccacagctatgaacaagttcactcagaccatctctaaacctgccactatcttgaatatttcagacagtgaagagtcgggcgatgaggcaggggtgggcaaggtgtcccgtaccacacagagctcagagaggtggcttgatttgctcattgaaaagttccagccgagcctacaaaacatcactagatacatcaactggaacttcatcaggatctgcaatgataggcttaaaaaagaaaaaatggggtacattgaggccaagcaatatgtggaagacatggcttggatggtgatagcatctgaggcagacagcattgagtggaagtgcataaggaggcaggagaaagtgactggggtgaaatacccaaagttcttctttgtacaacacaaagaggactggattgagtgcacaggatgcattccgtacccaggccatgacttgatctatgatgaggatgatgatgactgagctgactcagatcactccaaccagcagagagatccaccacctatagcaagtgatgtagtatttagtctatgattagttatagaaaaacattaggataaatacacatcctaggccgggccaaaatgtctctagacagattgaagctcaatgatgtctcaaacaaggatagcctgctgtccaactgcaaatacagtgttaccagatccacaggcgatgtaaccagtgtgtctggtcatgctatgcagaaagcccttgcaaggacactcggcatgttcttacttactgccttcaaccgttgcgaagaagtggcagaaatagggctccaatatgccatgtccttgctaggcagagatgatagcatcaagatattaagagaagccggctacaatgtaaaatgtgtggacacacagctcaaggactttacaatcaaattacaaggaaaggaatacaaaatacaagtcctagatatagtgggaatagatgcagccaatttagctgatctagagatacaagccagaggagtggtagcaaaagaactcaaaacaggagccaggctacctgacaatcggaggcatgatgcaccagattgtggtgtgatagttctctgtattgcagcattagttgtttccaaattagctgcaggggacaggggaggacttgatgctgtggaaagaagggctttaaatgtgctgaaagccgagaaagccaggtaccccaacatggaggtcaagcagatagctgaaagtttttatgatctgtttgaaaggaagccttattacattgatgtcttcatcacttttggcctggcccagtctagtgtcaagggaggcagcaaagttgaggggctgttttcaggtctcttcatgaatgcatacggggcaggacaagttatgctgaggtggggtttactggcaaaatctgtcaagaacatcatgctaggccatgctagtgtacaagctgagatggaacaggtggttgaggtttacgaatatgctcagaagcaaggaggggaggcaggattctatcacatcagaaataatccaaaagcttcacttctctctttgaccaattgtcctaatttcaccagtgttgtgcttggcaatgctgcaggtttaggcatcatagggtcatataagggtgctcctaggaatagagaactctttgatgctgccaaagattatgcagaaagattaaaggacaacaatgtaattaactacagtgcattaaacttgactgcagaagaaagagagctgatcagccagcagctgaacattgttgatgacactcctgatgatgatatttaattaaaactggaaaatgtaggataaatagccgccaccatgttcgtgtttctggtgctgctgcctctggtgagctcccagtgcgtgaacctgaccacaaggacccagctgccccctgcctataccaattccttcacacggggcgtgtactatcccgacaaggtgtttagatctagcgtgctgcactccacacaggatctgtttctgcctttcttttctaacgtgacctggttccacgccatccacgtgagcggcaccaatggcacaaagcggttcgacaatccagtgctgccctttaacgatggcgtgtacttcgcctccaccgagaagtctaacatcatcagaggctggatctttggcaccacactggacagcaagacacagtccctgctgatcgtgaacaatgccaccaacgtggtcatcaaggtgtgcgagttccagttttgtaatgatccattcctgggcgtgtactatcacaagaacaataagtcttggatggagagcgagtttcgcgtgtattcctctgccaacaattgcacatttgagtacgtgtcccagcccttcctgatggacctggagggcaagcagggcaatttcaagaacctgagggagttcgtgtttaagaatatcgatggctacttcaagatctactccaagcacaccccaatcaacctggtgcgcgacctgccacagggcttctctgccctggagccactggtggatctgcccatcggcatcaacatcacccggtttcagacactgctggccctgcacagaagctacctgacaccaggcgacagctcctctggatggaccgcaggagctgccgcctactatgtgggctatctgcagcccaggaccttcctgctgaagtacaacgagaatggcaccatcacagacgccgtggattgcgccctggatcccctgtctgagaccaagtgtacactgaagagctttaccgtggagaagggcatctatcagacaagcaatttcagggtgcagcctaccgagtccatcgtgcgctttcccaatatcacaaacctgtgcccttttggcgaggtgttcaacgcaacccgcttcgccagcgtgtacgcctggaataggaagcgcatctccaactgcgtggccgactattctgtgctgtacaacagcgcctccttctctacctttaagtgctatggcgtgagccccacaaagctgaatgacctgtgctttaccaacgtgtacgccgattccttcgtgatcaggggcgacgaggtgcgccagatcgcccctggccagacaggcaagatcgccgactacaattataagctgcctgacgatttcaccggctgcgtgatcgcctggaactctaacaatctggatagcaaagtgggcggcaactacaattatctgtaccggctgtttagaaagtctaatctgaagccattcgagagggacatctccacagagatctaccaggccggctctaccccctgcaatggcgtggagggctttaactgttatttccctctgcagagctacggcttccagccaacaaacggcgtgggctatcagccctaccgcgtggtggtgctgtcttttgagctgctgcacgcacctgcaacagtgtgcggaccaaagaagagcaccaatctggtgaagaacaagtgcgtgaacttcaacttcaacggactgaccggcacaggcgtgctgaccgagtccaacaagaagttcctgccttttcagcagttcggcagggacatcgcagataccacagacgccgtgcgcgaccctcagaccctggagatcctggatatcacaccatgctccttcggcggcgtgtctgtgatcacaccaggcaccaatacaagcaaccaggtggccgtgctgtatcaggacgtgaattgtaccgaggtgcccgtggcaatccacgcagatcagctgacccctacatggcgggtgtactctaccggcagcaacgtgttccagacaagagccggatgcctgatcggagccgagcacgtgaacaatagctatgagtgcgacatccctatcggcgccggcatctgtgcctcctaccagacccagacaaactccccacggagagcccggtctgtggccagccagtccatcatcgcctataccatgagcctgggcgccgagaattccgtggcctactccaacaattctatcgccatccctaccaacttcacaatctccgtgaccacagagatcctgccagtgagcatgaccaagacatccgtggactgcacaatgtatatctgtggcgattccaccgagtgctctaacctgctgctgcagtacggctctttttgtacccagctgaatagagccctgacaggcatcgccgtggagcaggacaagaacacacaggaggtgttcgcccaggtgaagcagatctacaagaccccacccatcaaggactttggcggcttcaacttcagccagatcctgcccgatcctagcaagccatccaagcggtcttttatcgaggacctgctgttcaacaaggtgaccctggccgatgccggcttcatcaagcagtatggcgattgcctgggcgacatcgccgccagagacctgatctgtgcccagaagtttaatggcctgaccgtgctgcctccactgctgacagatgagatgatcgcccagtacacatctgccctgctggccggcaccatcacaagcggatggaccttcggcgcaggagccgccctgcagatcccctttgccatgcagatggcctatcggttcaacggcatcggcgtgacccagaatgtgctgtacgagaaccagaagctgatcgccaatcagtttaactccgccatcggcaagatccaggactctctgagctccacagccagcgccctgggcaagctgcaggatgtggtgaatcagaacgcccaggccctgaataccctggtgaagcagctgtctagcaacttcggcgccatctcctctgtgctgaatgatatcctgagcaggctggacaaggtggaggcagaggtgcagatcgaccggctgatcacaggcagactgcagtccctgcagacctacgtgacacagcagctgatcagggcagcagagatcagggcctctgccaatctggccgccaccaagatgagcgagtgcgtgctgggccagtccaagagagtggacttttgtggcaagggctatcacctgatgagcttcccacagtccgcccctcacggagtggtgtttctgcacgtgacctacgtgccagcccaggagaagaacttcaccacagcaccagcaatctgccacgatggcaaggcacactttcctagggagggcgtgttcgtgagcaacggcacccactggtttgtgacacagcgcaatttctacgagccacagatcatcaccacagacaatacattcgtgtccggcaactgtgacgtggtcatcggcatcgtgaacaataccgtgtatgatcctctgcagccagagctggactcttttaaggaggagctggataagtacttcaagaatcacaccagccccgacgtggatctgggcgacatctctggcatcaatgccagcgtggtgaacatccagaaggagatcgacaggctgaacgaggtggccaagaatctgaacgagtccctgatcgatctgcaggagctgggcaagtatgagcagtacatcaagtggatcctgaccacactgctgttcgtggtcatgctgatcatcatcatggccgtgatcggctttatcctgtacaaggtgctgaagatgatccgggacaacaagctgaagagcaagtccacccccggcctgacagtgctgtcttgatagtatttaattaaaactggaaaatgtaggataaatatggagaaattcgcccccgaatttgttggcgaggatgctaacaagaaggcagaggagtttctcaaacatagatccttcccttcggaaaaaccactagctggtataccgaacactgccactcatgtcaccaaatataacatgccccctatattgcgtagctcattcaaactcccttccccgagagttgctgcaaatcttactgaaccctctgctccccctaccactccaccacccacacctccccagaacaaggaagagcagcccaaagagtctgatgttgacattgagactatgcatgtctgtaaggttcctgacaatccggaacacagcaagaagccatgctgctcagatgataccgatactaagaaaactaggaagccgatggtcacctttgtggaacccgaggagaaatttgtcggattgggagctagcttgtacagggagaccatgcagacctttgctgctgatggttatgatgaagaaagcaacctatcgtttgaggagactaaccaagagccgggttcttcatctgtagaacaaagactagatagaatagaggagaaattgtcctacataataggccttttaaacaccataatggtagcgactgctggacctaccactgctagagatgagattagagatgcccttataggcactagagaagaacttattgagatgatcaagtctgacatcttgactgtcaatgacagaatagtggccatggagaagctcagagatgaggaatgctccagagctgacactgatgatggatcagcctgttatttaacagacagagcaaggatactagataagatagtgtccagcaatgctgaagaggctaaggaagatttggatgttgatgacatcatgggcattaatttttagttaattaaaataacaacaggacaaataatggaggcctacttggtagagatgtaccatggtgtcccatatacagctgcagtacagctaaacttggttgaaaaacattcagccaacatatcactaactgtgtggataccgatgtttcaaacatctctaccaaagaactccgttatggacctgctacatgatgttacagtcatttgtacacagatatcaacagtgcatggtcccatgatcaaggtagatctgagctcttccaatgcaggtttagctaccatgccaaggcaattcttgataaatgctatcatagctttggatgactggggcaacatggattacgaagtgcctgttgcttttgataaaaagagcttctgtgtgacaattcttaagcctaaaaacatgctttacactgtacccagcattactcccactaatcgacctactcatgagctgatagctgtctgctctttccataacagggtaacattaaagtcattcaatatacctgtcttcatcagagcactgtctatcagacagcaggaccttgatagtgtggagcaggctataagctccgatgtggaccatgctataacaacagctagggtggctccctatgcagggcttacacttgtgatcaacatcacatccaccaaaggagcattcaaactgctaaaggcaggtagtcagattcttgcagaactgggtccctatctgacgcaggtgagcctacatgatgtgattatgaactggaaacatacaggcacttcctacatactcaagagctcctcaacaagtggatgaaaaagagaaagtcaccattgatcagctcaatccacaactacaaccccacgatttcacacagcacaacaaccaccgccaccaacatccacatgacaaccacacatacacacccacatacatatatacacatatcttagttaaataaaatcaggataaataatggatcctaacatgacctcacaccagatcaccctcgagatcaacatgaccagcagccgtattggcacatacactacaccagccccaacagctcttctccttgcatgtgccgtcatcaacacagtgtgtgcgctgataatggcctgcagcagtagaagcactgccacatcaggcattgtcagcagccaatgcacagttcatcccaatcaccctccaccaagttatggcgtcaatgtaactggtctgccgggtaacctatactcaaggaacactacataacattataaataacagaaattatccttcaataaaccccaggccagacagctttaccctgctagacgattcaatcagcccttgcagtatgtcgtctagttaacaaaaaaccggtaggataagtactatcctattggaaccaaacgagacctgtagagcagctcacacaagagaaccacaagctgacttcacctagtatgggaaggaacttagaagtgagtggcagcattaccaatttgaactttgagagaactcagcatcctgacacatttaggactgttgtaaaagtgaaccaaatgtgtaagcttattgcaggtgtgctcacaagtgctgctgtggcagtttgtgtgggggtcataatgtattctgttttcacatcaaaccacaaggccaactccacgcagaatgccacgacccggaacagcacatccacccctccccaaccaaccgccggtctgcccaccacagagcaagggaccatccccagattcaccaaaccccccaccaaaaccgccacccaccatgagatcacagagcccgtcaaaatggcaacaccttcagaggatccctaccaatgctccagcaatggttatttggaccgacctgatttacctgaaaatttcaaactcgtattggatgttatatgcaagcctccaggtcctgaacatcacaacaccagctgttatgagaaacgtgaaatcaacccaggaagtgtttgccctgatcttgtaacaatgaaggcaaacatgggcttaaacaatggtggtggggaggatgctgcaccttatatagaggttaccaccctttctacgtactccaacaaaagggcaatgtgtgtccacaatgggtgtgatcaaggcttctgtttcttcctttctggtttaagcactgatcaggagagagctgtgctagagcttggaggtcaacaggctatcatggagttgcattatgattcctactggaaacactattggagtaactctaattgtgttgttcccagaacaaactgcaacctgacagaccaaactgagattttgtttcctaggtttaacaacaagaatcagtctcagtgtaccacctgtgcagattcagctggcctagataacaaattttatctcacatgtgatgggcttttaagaaccctccctctagttggactacccagcctaagtcctcaggcttacaaagctgtacccacacaaactacaggcaccaccacggcaccaacatcagagacgaggcacccaacccctgcacccaggaggtccaaacctctcagtcggaagaagagagctttatgtggtgtagactcaagcagagaacccaaaccaacaatgccttactggtgtcctatgctccaattatttccaaggaggtctaattcttaagtgacctattcctgaattaacttcagaataagtaccaaccttatcagtagttaatgaaaactaagctttgatataataggacaaatatgattcctggcaggatctttctagtccttctggtgatcttcaacaccaagccaattcacccaaatacattaacagaaaaattctatgagtccacatgtagtgttgagactgcaggttataagagtgcccttagaacaggttggcatatgacagttatgtcaattaagttgtctcaaataaatattgagtcatgcaagagcagcaactcgttattggctcatgagcttgcaatctatagtagtgcagtggatgaattgagaacgttatcatccaatgccttgaagtccaaaaggaagaagaggttcctcggtttgattcttggtctcggagctgcagtcactgccggggtggctttagccaagacagtgcaacttgaaagtgagattgcattgattagagatgcagtgagaaatacaaatgaggctgttgttagcctaaccaacggcatgtcagtgttggctaaagtggtggatgatttgaaaaacttcatatctaaagaattactcccaaaaataaaccgagtctcttgtgatgtgcacgacatcactgccgtcattagattccaacagctcaacaaaagacttttggaagtatctcgtgaattttcatctaatgcaggattaacacacactgtttcatcttttatgttaacagaccgggaactcacctccattgtaggcggcatggctgtttcagcaggccaaaaagagataatgctatctagcaaagctataatgagaagaaatgggttagcaatattaagttcagtcaacgctgacacactggtttatgtaatacaactcccattatttggtgttatggacacagattgttgggtaataagaagttctatagactgtcataacatagcagacaagtatgcttgtttggctagagctgataatggctggtattgtcacaatgctggctcattatcatacttcccgtcgccaacggattgtgagatccacaatgggtatgctttctgtgacactctaaaaagtctaactgtacctgtaacatcacgagaatgcaactcaaacatgtataccactaactacgattgtaagatttccacaagtaaaacttatgtgagtacagcggtactgactacaatgggttgcttggtatcttgttatggtcataacagttgcacagtcatcaataatgacaaaggtataataaggactctgccagatggttgccactacatctccaacaaaggtgtggacagggttcaagtaggtaacactgtttactatcttagcaaagaagttggcaagtcaattgttgtcagaggggaaccattggtcttgaaatatgaccctttgagtttccctgacgataaatttgatgttgctataagagatgtggagcatagcatcaatcagacacgcacattcttgaaggcctctgatcagttattggacttaagtgaaaacagagagaataaaaatttaaacaagtcatatatactaacaactctgctcttcgttgtaatgcttattataataatggctgtcatagggttcattctgtataaggtattgaaaatgatcagagacaacaagttgaaatccaaaagtacacctggcctcacagttttatcatgacaattgtaccaaaccataattgagttagttaattaaaaacttaggataagtgacaatccagacccaacacctctttcaactctcaaggataaggtaggatgagtgtgagaccttgcaaatttgaggttcaagggttttgttccagagggaggaattgcaagtatagtcataaatattgggaatggcctttgaaaactcttatgctcaggcagaactacatgcttaataggatttataggttcctcgacaccaacacagatgcaatgtcagatgtcagcggatttgatgcaccacaaaggactgctgagtatgccttgggaaccataggtgtgctgaaaagttacctggaaaaaactaacaacatcactaaatcaatagcttgtggcagtttgatcactgtattgcagaacttggatgttggtctagtaatacaagcaagagatagcaacactgaggacaccaattacttgagaagttgcaacactatactgtcttatatagacaagatacacaagaagagacaaattattcacattctcaaaagactgccagtaggagtactatgcaatctgatccaatctgtcatctccatcgaggagaagataaattcttctatgaaaacagaatgataaggctgcctaaatactatccagccatactgcataagatgtatattattagagtaaatagaaacctcacttacgatgggtctggaccatccacaataatagatgcaggaaagtctgtggtgtggaatcgtgttgatgtgatagcttgtgtgaaagaggccttgtgctgcatagaattcagctggaataaccaagtgatcatagactttgattatagccaggccagatgatgtggactgtattcctttttttgtcagtaatcagttattaacccaaaattgttaattatgtagactttaagttaactaacttcatgttaattcaatagttatataaaaaaatattcgaattaggatcaatatggatcctattgatgaacaagaagttaatgtgtacttgccggatagctacttaaagggtgttatatcttttagtgaaactaatgctcttggcagctgtatcattggtagacctttcttgaaggatgactttactgccactacttcaatccgtaaccccctaattgaacataaaagaataagggacactaaattagtaaaaaatattgtttcaaaccctcaatataggttagtggagcctctccaaatgcagcatgagctcttgagtgtactatcgcccaatttcatattgcacactgccaacttaaggaaaattatacaaagaagtgttgacataacagataaaaagttgaaccccattttgcacattttgaatcttaattctcctaaccaagagggtaaggtgtcggaacggctaactaggctaattaagaaacatctctctcacatacctaattgggtaagcagctggtacaatatatgggtcaatcttaacaacttactgcaggagtaccgttcaaaggaagttatagaccataactgtgttctgactaggcaattgtctggaagtttcatacatgtggtcatgagtcaatatggagttgtgataattagcaaaaaaagtaaaagatatacaatgtgtacttataaccaattcctaacctggaaggaccttgccttgagcagatttaatgccaattatgtggtctggctaagtaatgtgttaaacacactcaacgaggggttgggattaaggtgtagattaaaaggtcatctgctcagtaagttgtacatttccactgacatctttttatcttcaacatctaatgaattttataatgtggtcaaggaatttgagggcttcatcatgtcactgatattgaaacaaactgaggaagccttatttagcacaaggttttataataacatgttgaacaacttaattgatgccattgatagggctcgactagagtatctggcccgctgtgccaattcagctgccaggattaatttacctagtacagatgttatgatagcatcattgggtgatatcttatctttgataaacgttttaggtgaatccaaccttaacaacttaagtgagttatattttatcttcaggatatttggtcaccctatggttgatgagaggaaggccatggatgcagtcagagataactgttgtgaaacaaagtttctgacggctaagaaccttgcatcgttaagaggagcatatgtttatagaattatcaaaggattcgtagcaaattataacaggtggccttacataaaaactagagtttgccttacaccaacatggattaactatcttgacaccaattcatgtccctcattattagagatgacagaagatgattttattgtgttagctggagtgcactttataagagaattccacatcccaaagctaactgatctggagattatattaaatgacaaggccatatctcctccaaaatcactcatttggtcatgctttccaaaaaactacatacctcaggttatacaagatgagtatgcccggaggtattgtagagctaaagcacctttgaagacaagacgtgtcttggagttctacttacaggacaaggatttcaagttggatcagctccatagagtagtagtgaaccaggactaccttaatgataaagaacatataatttctttaacaggaaaagaaagagagttgggtgttggtaggatgtttgccatgcaacctgggaagcagaggcaagtccaaattttagcagagaagctgttggctgataacatcctgcaattctttccggagacactgactagatacggtgatttggagctgcaaaagatactagagttaaaagctggactttcaaataaaaatgacagatctaaagactcctacaataattatataagtaggtgctcattaattactgatttaagtaaatttaaccaagcttttaggtacgagtcatcctgtgtgtgtagtgatcttttagatgagctacatgggactcaaagcttattctcttggctgcatttaacagtaccactgactactataatgtgtacatataggcatgcgccgccggacactggaaacaactataatgtagatgatattgctgagcagagtggactctaccgctaccacatgggcgggattgagggctggtgccagaagctctggacaacagaggccattgctttgctagatactgtagctgtgaagggccgtttccagctaacttcattaataaatggcgacaaccaaagtattgatatttcaaaaccaacaaggctggggaccaggactcaaagtgaagcagattatgatttggcaataaattctttaagattaatatcagcagcttataaaggcattggacataaattaaaagaaggtgagacctacttgtcacgtgacatgcagttcatgagtaaaacaatacaacatgaaggggtctactacccggcctccatcaagaaaatattaagagttggtccctggatcaacacaatattagatgatataaaaacttcaacagaaagtattggttctctaactcaagaactagaatataaaggtgaaagtttaatgagcagcctgctgctgaggaacttctggctctacagattatattcagtggatttaaaagatcattctttgtgtggaaagcagctctacagatccttaataaaagtgttaaaacatttgaagaggtgcttcaacctggagaaccttggggaatgtttggaattatttttaaatgtgcccatgcagtttggaggtgctgacccaaatgtcatctacaggagcttctacagaagaactccagattttctaacagaaagtataactcatctcatcctcattttaaaacattttagaagagatttggaattcaacaaagataatgtctccaaagctgttctttctttgctagagttcaccaagaatgattctgcagaatttgtaactttgatgagagatcctcaagcaattggtagtgagaggcaggccaagatcacttcagacatcaacagaacagctgtaacttcagtgttatcaaatgctccaaatgaaatatttagaacttcagctcttcattacagcagcacagaaaatgaattaaatggaatagcaagtggagtttctcctgtttatcctcatggtcttcgagttttatatgaaagtttacctttttataaagcagagaagattgtcaacatggtttctgggaccaagtccatcaccaacatactggagaagacatcagccatctcctacacagatataattcgagccaccaacatgatggtggagaacctcactttgctaacaagaataatgaaaccaggtgctgacacatctttggatcctgacacaatagtaataacaatattatcaaaaataataagagataaatcctgggatgttggtgatataattggtgtcacttccccatctcctgtctcctgcttcaaggtggtctacacatcaactctacaaaataattcagtagtaatagaaagatacacaacagacacctacacaagaggtaagagaggccccaccaagccctgggtgggcagcagcacacaggagaagaagtccatgcctgtctacaacagacaagttttaacaagaggacaaagagatcaaatagaaaatatagcaaagctggagtgggtgttttcttcagtagcaaatattgattctttgctaaatgagctcagcaccatgactttgggtctttctctaaggaaatgtagacaactttttccaacatatttaagtttaaacttcctgcacaggctttctgtcagcagcaggcccagagaatatccttcttctcttcctgcctacaggacaacaaattttcattttgatactggaccaataaataaagtgttaacagaaagatttggagatgaagatataaatttggtatttcaaaatgcaatatcatatggtctttccaccatgtctttggtggagcagtttactggtgtctgtccaaataaagttttgctggtgcccaagctacaagaaatacaactaatgaaagttccaatatttcaaggtggcttcaacctacaaagtataattccaataataaggcagcagcacatgttcctgcccaaccacatcactccagcccagtatattgaattatttctttcttcaaaacaatttcattcaagaataaatttaaaacacaacaacagatttaaacttgttttacaaaaagattattttaatggggagaacatgatagaaactttgtccacctgtttggcaggccactggatcatcattttgatgctaatgaaggagagtcaggggatatttgacaaggagtggtatgatggttttgtaacagaccacatgttcctggacctgcagctcttcctctcctccttcaagacatttctaactgtcttcaactttgcttatttaaaagttggttcaaatatagaagaaataacaggaaatcaagccaacctgctggagctgctggacctgggctactggaagaacatgtataaagtattttcagagaccaaggtgcggctggctttgctaaaacaagatttatcatttaattctgtgaagaacagcagcagcttccggcactggtttataaattctctacaagaagtacaatgtacttctgtgccttgggtggtaaatgtaacaagaaatccaactcatttaaaaggtgttctacagtacatgaagatgatagaaagtggcatgattcaaggttattcagcaaatatttcttcagttttaagtatcccatataattatccagacatggcgcacatgatgacaaaaataataagaaatcgaggccacatgtcctatgattatccaaagatgaagaaaagtttaactttctccatgacagacatgagtgacagctacatgctcaacctcttccccaaagtagaatgttcttacatgagtggttatttggataaactagatgatactctacaacttctaaagaaacctcctgttggaagaaaagttccttctgtggctttgccctggcaccactgcaacagatacaactttgtcttcagcagcacaggctgcaaagtttctgtcattgacatgcttccaaaacatttccgaagaagtaatttaaaagtaatatgttttattggagaaggggcgggcaacctcatgctaagagctgttttggaagttggtggaaatataaaattaatatatagatccttaaaagatcctgatgatcatcatgttcctgtagaatttctaagattaaaaccttgttatccttatattgatactggtggcagtttatctttggcttcaacagatgccaccaacaaggcccactgggattatttacatcttcactggacagatcctttaaatttaatagtatgtgatgcagaaataagtggtgtgaagcactggctaaaaattcttcacaggtggtatgagcacatgacttcctgcaagcactgtttaaaatcagaacatgataaatatttaataataaaatatcatgctcaagatgatttaatagatcttcctcatggtgtcaggctactaaaatgtaacatctgcctgggctccaaactaagtggcagtgagagctacctgctcattggtcttggtctttcaaataaacttcctgtctacagtgaagttcttcattcaaaacttcttttggcagaatgtcatcagtttcatcatccaaaatatttggatgtttctggaataaatacaaatataaaatccttaataccaatgttggattatccaataacttacaacaagatcaccactttgctagaaagtgtgcgggagctttcttcaaataaaaacaagaacaccatgtggattggaagaaatcctgtctaccataataaatggctaaagaggaaatatttcaacattttaaaatggctaaaatactgtatagaacttcctgccttcaggatggattataattcatttgagagaatagaaatgctttatccaaatttaagagatttggtagattctgtttctacttcagagctgaagaaagtaataaaagtaacaggcatcctcttcaggagcaacaccatgtgaattaatatgccaatgctaacatgtcatccccactactttttttgttcaatcactctcagtctagacatgtgagaagatcccaaacccaactgcacccctcccactcgaaatcagttgtagcctcagcagctccatctgccatgatctctgaccagcagcaaatgtattattattttaatttgtctatagttaacaaaaaattgatatctcacaggttgtaaacatagttcttttataattattgttagttaaactattgtgtttgacttcctttgggtatttttttcccgt

SEQ ID NO: 24 - DNA, 21705 bp, synthetic construct
  source 1..21705: mol_type = other DNA
acgcgaaaaaatgcataacaaaactatcaacctgaaaaaagttaggacaagtgaagattgctagtcccaaagaccagaatcatgggctgtaatgtgatgatggagcttgattatggtggacgagctgcatggctggcattccacataaccaactttgataggtcagatttggaaactatcctaagaggtgctagggtgtgcaatacatggcaagatcagagactctccgtgtaccttgtgggaagggattgcaatttgttaagaccatttgtgcaagctgccaaatttatccataatactaggagaggccaaacattaacacattggttcacaaaaaatatcgtgtttagttctacagggcaagagacagagcctcccattgaccccacatgtgagctgttggtagagctgatcagtggttaagatgacagcacattatgtagttaattaaaacaaagggtaggacaagtcctaatgtccacagctatgaacaagttcactcagaccatctctaaacctgccactatcttgaatatttcagacagtgaagagtcgggcgatgaggcaggggtgggcaaggtgtcccgtaccacacagagctcagagaggtggcttgatttgctcattgaaaagttccagccgagcctacaaaacatcactagatacatcaactggaacttcatcaggatctgcaatgataggcttaaaaaagaaaaaatggggtacattgaggccaagcaatatgtggaagacatggcttggatggtgatagcatctgaggcagacagcattgagtggaagtgcataaggaggcaggagaaagtgactggggtgaaatacccaaagttcttctttgtacaacacaaagaggactggattgagtgcacaggatgcattccgtacccaggccatgacttgatctatgatgaggatgatgatgactgagctgactcagatcactccaaccagcagagagatccaccacctatagcaagtgatgtagtatttagtctatgattagttatagaaaaacattaggataaatacacatcctaggccgggccaaaatgtctctagacagattgaagctcaatgatgtctcaaacaaggatagcctgctgtccaactgcaaatacagtgttaccagatccacaggcgatgtaaccagtgtgtctggtcatgctatgcagaaagcccttgcaaggacactcggcatgttcttacttactgccttcaaccgttgcgaagaagtggcagaaatagggctccaatatgccatgtccttgctaggcagagatgatagcatcaagatattaagagaagccggctacaatgtaaaatgtgtggacacacagctcaaggactttacaatcaaattacaaggaaaggaatacaaaatacaagtcctagatatagtgggaatagatgcagccaatttagctgatctagagatacaagccagaggagtggtagcaaaagaactcaaaacaggagccaggctacctgacaatcggaggcatgatgcaccagattgtggtgtgatagttctctgtattgcagcattagttgtttccaaattagctgcaggggacaggggaggacttgatgctgtggaaagaagggctttaaatgtgctgaaagccgagaaagccaggtaccccaacatggaggtcaagcagatagctgaaagtttttatgatctgtttgaaaggaagccttattacattgatgtcttcatcacttttggcctggcccagtctagtgtcaagggaggcagcaaagttgaggggctgttttcaggtctcttcatgaatgcatacggggcaggacaagttatgctgaggtggggtttactggcaaaatctgtcaagaacatcatgctaggccatgctagtgtacaagctgagatggaacaggtggttgaggtttacgaatatgctcagaagcaaggaggggaggcaggattctatcacatcagaaataatccaaaagcttcacttctctctttgaccaattgtcctaatttcaccagtgttgtgcttggcaatgctgcaggtttaggcatcatagggtcatataagggtgctcctaggaatagagaactctttgatgctgccaaagattatgcagaaagattaaaggacaacaatgtaattaactacagtgcattaaacttgactgcagaagaaagagagctgatcagccagcagctgaacattgttgatgacactcctgatgatgatatttaattaaaactggaaaatgtaggataaatagccgccaccatgttcgtgtttctggtgctgctgcctctggtgagctcccagtgcgtgaacctgaccacaaggacccagctgccccctgcctataccaattccttcacacggggcgtgtactatcccgacaaggtgtttagatctagcgtgctgcactccacacaggatctgtttctgcctttcttttctaacgtgacctggttccacgccatccacgtgagcggcaccaatggcacaaagcggttcgacaatccagtgctgccctttaacgatggcgtgtacttcgcctccaccgagaagtctaacatcatcagaggctggatctttggcaccacactggacagcaagacacagtccctgctgatcgtgaacaatgccaccaacgtggtcatcaaggtgtgcgagttccagttttgtaatgatccattcctgggcgtgtactatcacaagaacaataagtcttggatggagagcgagtttcgcgtgtattcctctgccaacaattgcacatttgagtacgtgtcccagcccttcctgatggacctggagggcaagcagggcaatttcaagaacctgagggagttcgtgtttaagaatatcgatggctacttcaagatctactccaagcacaccccaatcaacctggtgcgcgacctgccacagggcttctctgccctggagccactggtggatctgcccatcggcatcaacatcacccggtttcagacactgctggccctgcacagaagctacctgacaccaggcgacagctcctctggatggaccgcaggagctgccgcctactatgtgggctatctgcagcccaggaccttcctgctgaagtacaacgagaatggcaccatcacagacgccgtggattgcgccctggatcccctgtctgagaccaagtgtacactgaagagctttaccgtggagaagggcatctatcagacaagcaatttcagggtgcagcctaccgagtccatcgtgcgctttcccaatatcacaaacctgtgcccttttggcgaggtgttcaacgcaacccgcttcgccagcgtgtacgcctggaataggaagcgcatctccaactgcgtggccgactattctgtgctgtacaacagcgcctccttctctacctttaagtgctatggcgtgagccccacaaagctgaatgacctgtgctttaccaacgtgtacgccgattccttcgtgatcaggggcgacgaggtgcgccagatcgcccctggccagacaggcaagatcgccgactacaattataagctgcctgacgatttcaccggctgcgtgatcgcctggaactctaacaatctggatagcaaagtgggcggcaactacaattatctgtaccggctgtttagaaagtctaatctgaagccattcgagagggacatctccacagagatctaccaggccggctctaccccctgcaatggcgtggagggctttaactgttatttccctctgcagagctacggcttccagccaacaaacggcgtgggctatcagccctaccgcgtggtggtgctgtcttttgagctgctgcacgcacctgcaacagtgtgcggaccaaagaagagcaccaatctggtgaagaacaagtgcgtgaacttcaacttcaacggactgaccggcacaggcgtgctgaccgagtccaacaagaagttcctgccttttcagcagttcggcagggacatcgcagataccacagacgccgtgcgcgaccctcagaccctggagatcctggatatcacaccatgctccttcggcggcgtgtctgtgatcacaccaggcaccaatacaagcaaccaggtggccgtgctgtatcaggacgtgaattgtaccgaggtgcccgtggcaatccacgcagatcagctgacccctacatggcgggtgtactctaccggcagcaacgtgttccagacaagagccggatgcctgatcggagccgagcacgtgaacaatagctatgagtgcgacatccctatcggcgccggcatctgtgcctcctaccagacccagacaaactccccacggagagcccggtctgtggccagccagtccatcatcgcctataccatgagcctgggcgccgagaattccgtggcctactccaacaattctatcgccatccctaccaacttcacaatctccgtgaccacagagatcctgccagtgagcatgaccaagacatccgtggactgcacaatgtatatctgtggcgattccaccgagtgctctaacctgctgctgcagtacggctctttttgtacccagctgaatagagccctgacaggcatcgccgtggagcaggacaagaacacacaggaggtgttcgcccaggtgaagcagatctacaagaccccacccatcaaggactttggcggcttcaacttcagccagatcctgcccgatcctagcaagccatccaagcggtcttttatcgaggacctgctgttcaacaaggtgaccctggccgatgccggcttcatcaagcagtatggcgattgcctgggcgacatcgccgccagagacctgatctgtgcccagaagtttaatggcctgaccgtgctgcctccactgctgacagatgagatgatcgcccagtacacatctgccctgctggccggcaccatcacaagcggatggaccttcggcgcaggagccgccctgcagatcccctttgccatgcagatggcctatcggttcaacggcatcggcgtgacccagaatgtgctgtacgagaaccagaagctgatcgccaatcagtttaactccgccatcggcaagatccaggactctctgagctccacagccagcgccctgggcaagctgcaggatgtggtgaatcagaacgcccaggccctgaataccctggtgaagcagctgtctagcaacttcggcgccatctcctctgtgctgaatgatatcctgagcaggctggacaaggtggaggcagaggtgcagatcgaccggctgatcacaggcagactgcagtccctgcagacctacgtgacacagcagctgatcagggcagcagagatcagggcctctgccaatctggccgccaccaagatgagcgagtgcgtgctgggccagtccaagagagtggacttttgtggcaagggctatcacctgatgagcttcccacagtccgcccctcacggagtggtgtttctgcacgtgacctacgtgccagcccaggagaagaacttcaccacagcaccagcaatctgccacgatggcaaggcacactttcctagggagggcgtgttcgtgagcaacggcacccactggtttgtgacacagcgcaatttctacgagccacagatcatcaccacagacaatacattcgtgtccggcaactgtgacgtggtcatcggcatcgtgaacaataccgtgtatgatcctctgcagccagagctggactcttttaaggaggagctggataagtacttcaagaatcacaccagccccgacgtggatctgggcgacatctctggcatcaatgccagcgtggtgaacatccagaaggagatcgacaggctgaacgaggtggccaagaatctgaacgagtccctgatcgatctgcaggagctgggcaagtatgagcagtacatcaagtggatcctgaccacactgctgttcgtggtcatgctgatcatcatcatggccgtgatcggctttatcctgtacaaggtgctgaagatgatccgggacaacaagctgaagagcaagtccacccccggcctgacagtgctgtcttgatagtatttaattaaaactggaaaatgtaggataaatatggagaaattcgcccccgaatttgttggcgaggatgctaacaagaaggcagaggagtttctcaaacatagatccttcccttcggaaaaaccactagctggtataccgaacactgccactcatgtcaccaaatataacatgccccctatattgcgtagctcattcaaactcccttccccgagagttgctgcaaatcttactgaaccctctgctccccctaccactccaccacccacacctccccagaacaaggaagagcagcccaaagagtctgatgttgacattgagactatgcatgtctgtaaggttcctgacaatccggaacacagcaagaagccatgctgctcagatgataccgatactaagaaaactaggaagccgatggtcacctttgtggaacccgaggagaaatttgtcggattgggagctagcttgtacagggagaccatgcagacctttgctgctgatggttatgatgaagaaagcaacctatcgtttgaggagactaaccaagagccgggttcttcatctgtagaacaaagactagatagaatagaggagaaattgtcctacataataggccttttaaacaccataatggtagcgactgctggacctaccactgctagagatgagattagagatgcccttataggcactagagaagaacttattgagatgatcaagtctgacatcttgactgtcaatgacagaatagtggccatggagaagctcagagatgaggaatgctccagagctgacactgatgatggatcagcctgttatttaacagacagagcaaggatactagataagatagtgtccagcaatgctgaagaggctaaggaagatttggatgttgatgacatcatgggcattaatttttagttaattaaaataacaacaggacaaataatggaggcctacttggtagagatgtaccatggtgtcccatatacagctgcagtacagctaaacttggttgaaaaacattcagccaacatatcactaactgtgtggataccgatgtttcaaacatctctaccaaagaactccgttatggacctgctacatgatgttacagtcatttgtacacagatatcaacagtgcatggtcccatgatcaaggtagatctgagctcttccaatgcaggtttagctaccatgccaaggcaattcttgataaatgctatcatagctttggatgactggggcaacatggattacgaagtgcctgttgcttttgataaaaagagcttctgtgtgacaattcttaagcctaaaaacatgctttacactgtacccagcattactcccactaatcgacctactcatgagctgatagctgtctgctctttccataacagggtaacattaaagtcattcaatatacctgtcttcatcagagcactgtctatcagacagcaggaccttgatagtgtggagcaggctataagctccgatgtggaccatgctataacaacagctagggtggctccctatgcagggcttacacttgtgatcaacatcacatccaccaaaggagcattcaaactgctaaaggcaggtagtcagattcttgcagaactgggtccctatctgacgcaggtgagcctacatgatgtgattatgaactggaaacatacaggcacttcctacatactcaagagctcctcaacaagtggatgaaaaagagaaagtcaccattgatcagctcaatccacaactacaaccccacgatttcacacagcacaacaaccaccgccaccaacatccacatgacaaccacacatacacacccacatacatatatacacatatcttagttaaataaaatcaggataaataatggatcctaacatgacctcacaccagatcaccctcgagatcaacatgaccagcagccgtattggcacatacactacaccagccccaacagctcttctccttgcatgtgccgtcatcaacacagtgtgtgcgctgataatggcctgcagcagtagaagcactgccacatcaggcattgtcagcagccaatgcacagttcatcccaatcaccctccaccaagttatggcgtcaatgtaactggtctgccgggtaacctatactcaaggaacactacataacattataaataacagaaattatccttcaataaaccccaggccagacagctttaccctgctagacgattcaatcagcccttgcagtatgtcgtctagttaacaaaaaaccggtaggataagtactatcctattggaaccaaacgagacctgtagagcagctcacacaagagaaccacaagctgacttcacctagtatgggaaggaacttagaagtgagtggcagcattaccaatttgaactttgagagaactcagcatcctgacacatttaggactgttgtaaaagtgaaccaaatgtgtaagcttattgcaggtgtgctcacaagtgctgctgtggcagtttgtgtgggggtcataatgtattctgttttcacatcaaaccacaaggccaactccacgcagaatgccacgacccggaacagcacatccacccctccccaaccaaccgccggtctgcccaccacagagcaagggaccatccccagattcaccaaaccccccaccaaaaccgccacccaccatgagatcacagagcccgtcaaaatggcaacaccttcagaggatccctaccaatgctccagcaatggttatttggaccgacctgatttacctgaaaatttcaaactcgtattggatgttatatgcaagcctccaggtcctgaacatcacaacaccagctgttatgagaaacgtgaaatcaacccaggaagtgtttgccctgatcttgtaacaatgaaggcaaacatgggcttaaacaatggtggtggggaggatgctgcaccttatatagaggttaccaccctttctacgtactccaacaaaagggcaatgtgtgtccacaatgggtgtgatcaaggcttctgtttcttcctttctggtttaagcactgatcaggagagagctgtgctagagcttggaggtcaacaggctatcatggagttgcattatgattcctactggaaacactattggagtaactctaattgtgttgttcccagaacaaactgcaacctgacagaccaaactgagattttgtttcctaggtttaacaacaagaatcagtctcagtgtaccacctgtgcagattcagctggcctagataacaaattttatctcacatgtgatgggcttttaagaaccctccctctagttggactacccagcctaagtcctcaggcttacaaagctgtacccacacaaactacaggcaccaccacggcaccaacatcagagacgaggcacccaacccctgcacccaggaggtccaaacctctcagtcggaagaagagagctttatgtggtgtagactcaagcagagaacccaaaccaacaatgccttactggtgtcctatgctccaattatttccaaggaggtctaattcttaagtgacctattcctgaattaacttcagaataagtaccaaccttatcagtagttaatgaaaactaagctttgatataataggacaaatatgattcctggcaggatctttctagtccttctggtgatcttcaacaccaagccaattcacccaaatacattaacagaaaaattctatgagtccacatgtagtgttgagactgcaggttataagagtgcccttagaacaggttggcatatgacagttatgtcaattaagttgtctcaaataaatattgagtcatgcaagagcagcaactcgttattggctcatgagcttgcaatctatagtagtgcagtggatgaattgagaacgttatcatccaatgccttgaagtccaaaaggaagaagaggttcctcggtttgattcttggtctcggagctgcagtcactgccggggtggctttagccaagacagtgcaacttgaaagtgagattgcattgattagagatgcagtgagaaatacaaatgaggctgttgttagcctaaccaacggcatgtcagtgttggctaaagtggtggatgatttgaaaaacttcatatctaaagaattactcccaaaaataaaccgagtctcttgtgatgtgcacgacatcactgccgtcattagattccaacagctcaacaaaagacttttggaagtatctcgtgaattttcatctaatgcaggattaacacacactgtttcatcttttatgttaacagaccgggaactcacctccattgtaggcggcatggctgtttcagcaggccaaaaagagataatgctatctagcaaagctataatgagaagaaatgggttagcaatattaagttcagtcaacgctgacacactggtttatgtaatacaactcccattatttggtgttatggacacagattgttgggtaataagaagttctatagactgtcataacatagcagacaagtatgcttgtttggctagagctgataatggctggtattgtcacaatgctggctcattatcatacttcccgtcgccaacggattgtgagatccacaatgggtatgctttctgtgacactctaaaaagtctaactgtacctgtaacatcacgagaatgcaactcaaacatgtataccactaactacgattgtaagatttccacaagtaaaacttatgtgagtacagcggtactgactacaatgggttgcttggtatcttgttatggtcataacagttgcacagtcatcaataatgacaaaggtataataaggactctgccagatggttgccactacatctccaacaaaggtgtggacagggttcaagtaggtaacactgtttactatcttagcaaagaagttggcaagtcaattgttgtcagaggggaaccattggtcttgaaatatgaccctttgagtttccctgacgataaatttgatgttgctataagagatgtggagcatagcatcaatcagacacgcacattcttgaaggcctctgatcagttattggacttaagtgaaaacagagagaataaaaatttaaacaagtcatatatactaacaactctgctcttcgttgtaatgcttattataataatggctgtcatagggttcattctgtataaggtattgaaaatgatcagagacaacaagttgaaatccaaaagtacacctggcctcacagttttatcatgacaattgtaccaaaccataattgagttagttaattaaaaacttaggataagtgacaatccagacccaacacctctttcaactctcaaggataaggtaggatgagtgtgagaccttgcaaatttgaggttcaagggttttgttccagagggaggaattgcaagtatagtcataaatattgggaatggcctttgaaaactcttatgctcaggcagaactacatgcttaataggatttataggttcctcgacaccaacacagatgcaatgtcagatgtcagcggatttgatgcaccacaaaggactgctgagtatgccttgggaaccataggtgtgctgaaaagttacctggaaaaaactaacaacatcactaaatcaatagcttgtggcagtttgatcactgtattgcagaacttggatgttggtctagtaatacaagcaagagatagcaacactgaggacaccaattacttgagaagttgcaacactatactgtcttatatagacaagatacacaagaagagacaaattattcacattctcaaaagactgccagtaggagtactatgcaatctgatccaatctgtcatctccatcgaggagaagataaattcttctatgaaaacagaatgataaggctgcctaaatactatccagccatactgcataagatgtatattattagagtaaatagaaacctcacttacgatgggtctggaccatccacaataatagatgcaggaaagtctgtggtgtggaatcgtgttgatgtgatagcttgtgtgaaagaggccttgtgctgcatagaattcagctggaataaccaagtgatcatagactttgattatagccaggccagatgatgtggactgtattcctttttttgtcagtaatcagttattaacccaaaattgttaattatgtagactttaagttaactaacttcatgttaattcaatagttatataaaaaaatattcgaattaggatcaatatggatcctattgatgaacaagaagttaatgtgtacttgccggatagctacttaaagggtgttatatcttttagtgaaactaatgctcttggcagctgtatcattggtagacctttcttgaaggatgactttactgccactacttcaatccgtaaccccctaattgaacataaaagaataagggacactaaattagtaaaaaatattgtttcaaaccctcaatataggttagtggagcctctccaaatgcagcatgagctcttgagtgtactatcgcccaatttcatattgcacactgccaacttaaggaaaattatacaaagaagtgttgacataacagataaaaagttgaaccccattttgcacattttgaatcttaattctcctaaccaagagggtaaggtgtcggaacggctaactaggctaattaagaaacatctctctcacatacctaattgggtaagcagctggtacaatatatgggtcaatcttaacaacttactgcaggagtaccgttcaaaggaagttatagaccataactgtgttctgactaggcaattgtctggaagtttcatacatgtggtcatgagtcaatatggagttgtgataattagcaaaaaaagtaaaagatatacaatgtgtacttataaccaattcctaacctggaaggaccttgccttgagcagatttaatgccaattatgtggtctggctaagtaatgtgttaaacacactcaacgaggggttgggattaaggtgtagattaaaaggtcatctgctcagtaagttgtacatttccactgacatctttttatcttcaacatctaatgaattttataatgtggtcaaggaatttgagggcttcatcatgtcactgatattgaaacaaactgaggaagccttatttagcacaaggttttataataacatgttgaacaacttaattgatgccattgatagggctcgactagagtatctggcccgctgtgccaattcagctgccaggattaatttacctagtacagatgttatgatagcatcattgggtgatatcttatctttgataaacgttttaggtgaatccaaccttaacaacttaagtgagttatattttatcttcaggatatttggtcaccctatggttgatgagaggaaggccatggatgcagtcagagataactgttgtgaaacaaagtttctgacggctaagaaccttgcatcgttaagaggagcatatgtttatagaattatcaaaggattcgtagcaaattataacaggtggccttacataaaaactagagtttgccttacaccaacatggattaactatcttgacaccaattcatgtccctcattattagagatgacagaagatgattttattgtgttagctggagtgcactttataagagaattccacatcccaaagctaactgatctggagattatattaaatgacaaggccatatctcctccaaaatcactcatttggtcatgctttccaaaaaactacatacctcaggttatacaagatgagtatgcccggaggtattgtagagctaaagcacctttgaagacaagacgtgtcttggagttctacttacaggacaaggatttcaagttggatcagctccatagagtagtagtgaaccaggactaccttaatgataaagaacatataatttctttaacaggaaaagaaagagagttgggtgttggtaggatgtttgccatgcaacctgggaagcagaggcaagtccaaattttagcagagaagctgttggctgataacatcctgcaattctttccggagacactgactagatacggtgatttggagctgcaaaagatactagagttaaaagctggactttcaaataaaaatgacagatctaaagactcctacaataattatataagtaggtgctcattaattactgatttaagtaaatttaaccaagcttttaggtacgagtcatcctgtgtgtgtagtgatcttttagatgagctacatgggactcaaagcttattctcttggctgcatttaacagtaccactgactactataatgtgtacatataggcatgcgccgccggacactggaaacaactataatgtagatgatattgctgagcagagtggactctaccgctaccacatgggcgggattgagggctggtgccagaagctctggacaacagaggccattgctttgctagatactgtagctgtgaagggccgtttccagctaacttcattaataaatggcgacaaccaaagtattgatatttcaaaaccaacaaggctggggaccaggactcaaagtgaagcagattatgatttggcaataaattctttaagattaatatcagcagcttataaaggcattggacataaattaaaagaaggtgagacctacttgtcacgtgacatgcagttcatgagtaaaacaatacaacatgaaggggtctactacccggcctccatcaagaaaatattaagagttggtccctggatcaacacaatattagatgatataaaaacttcaacagaaagtattggttctctaactcaagaactagaatataaaggtgaaagtttaatgagcagcctgctgctgaggaacttctggctctacagattatattcagtggatttaaaagatcattctttgtgtggaaagcagctctacagatccttaataaaagtgttaaaacatttgaagaggtgcttcaacctggagaaccttggggaatgtttggaattatttttaaatgtgcccatgcagtttggaggtgctgacccaaatgtcatctacaggagcttctacagaagaactccagattttctaacagaaagtataactcatctcatcctcattttaaaacattttagaagagatttggaattcaacaaagataatgtctccaaagctgttctttctttgctagagttcaccaagaatgattctgcagaatttgtaactttgatgagagatcctcaagcaattggtagtgagaggcaggccaagatcacttcagacatcaacagaacagctgtaacttcagtgttatcaaatgctccaaatgaaatatttagaacttcagctcttcattacagcagcacagaaaatgaattaaatggaatagcaagtggagtttctcctgtttatcctcatggtcttcgagttttatatgaaagtttacctttttataaagcagagaagattgtcaacatggtttctgggaccaagtccatcaccaacatactggagaagacatcagccatctcctacacagatataattcgagccaccaacatgatggtggagaacctcactttgctaacaagaataatgaaaccaggtgctgacacatctttggatcctgacacaatagtaataacaatattatcaaaaataataagagataaatcctgggatgttggtgatataattggtgtcacttccccatctcctgtctcctgcttcaaggtggtctacacatcaactctacaaaataattcagtagtaatagaaagatacacaacagacacctacacaagaggtaagagaggccccaccaagccctgggtgggcagcagcacacaggagaagaagtccatgcctgtctacaacagacaagttttaacaagaggacaaagagatcaaatagaaaatatagcaaagctggagtgggtgttttcttcagtagcaaatattgattctttgctaaatgagctcagcaccatgactttgggtctttctctaaggaaatgtagacaactttttccaacatatttaagtttaaacttcctgcacaggctttctgtcagcagcaggcccagagaatatccttcttctcttcctgcctacaggacaacaaattttcattttgatactggaccaataaataaagtgttaacagaaagatttggagatgaagatataaatttggtatttcaaaatgcaatatcatatggtctttccaccatgtctttggtggagcagtttactggtgtctgtccaaataaagttttgctggtgcccaagctacaagaaatacaactaatgaaagttccaatatttcaaggtggcttcaacctacaaagtataattccaataataaggcagcagcacatgttcctgcccaaccacatcactccagcccagtatattgaattatttctttcttcaaaacaatttcattcaagaataaatttaaaacacaacaacagatttaaacttgttttacaaaaagattattttaatggggagaacatgatagaaactttgtccacctgtttggcaggccactggatcatcattttgatgctaatgaaggagagtcaggggatatttgacaaggagtggtatgatggttttgtaacagaccacatgttcctggacctgcagctcttcctctcctccttcaagacatttctaactgtcttcaactttgcttatttaaaagttggttcaaatatagaagaaataacaggaaatcaagccaacctgctggagctgctggacctgggctactggaagaacatgtataaagtattttcagagaccaaggtgcggctggctttgctaaaacaagatttatcatttaattctgtgaagaacagcagcagcttccggcactggtttataaattctctacaagaagtacaatgtacttctgtgccttgggtggtaaatgtaacaagaaatccaactcatttaaaaggtgttctacagtacatgaagatgatagaaagtggcatgattcaaggttattcagcaaatatttcttcagttttaagtatcccatataattatccagacatggcgcacatgatgacaaaaataataagaaatcgaggccacatgtcctatgattatccaaagatgaagaaaagtttaactttctccatgacagacatgagtgacagctacatgctcaacctcttccccaaagtagaatgttcttacatgagtggttatttggataaactagatgatactctacaacttctaaagaaacctcctgttggaagaaaagttccttctgtggctttgccctggcaccactgcaacagatacaactttgtcttcagcagcacaggctgcaaagtttctgtcattgacatgcttccaaaacatttccgaagaagtaatttaaaagtaatatgttttattggagaaggggcgggcaacctcatgctaagagctgttttggaagttggtggaaatataaaattaatatatagatccttaaaagatcctgatgatcatcatgttcctgtagaatttctaagattaaaaccttgttatccttatattgatactggtggcagtttatctttggcttcaacagatgccaccaacaaggcccactgggattatttacatcttcactggacagatcctttaaatttaatagtatgtgatgcagaaataagtggtgtgaagcactggctaaaaattcttcacaggtggtatgagcacatgacttcctgcaagcactgtttaaaatcagaacatgataaatatttaataataaaatatcatgctcaagatgatttaatagatcttcctcatggtgtcaggctactaaaatgtaacatctgcctgggctccaaactaagtggcagtgagagctacctgctcattggtcttggtctttcaaataaacttcctgtctacagtgaagttcttcattcaaaacttcttttggcagaatgtcatcagtttcatcatccaaaatatttggatgtttctggaataaatacaaatataaaatccttaataccaatgttggattatccaataacttacaacaagatcaccactttgctagaaagtgtgcgggagctttcttcaaataaaaacaagaacaccatgtggattggaagaaatcctgtctaccataataaatggctaaagaggaaatatttcaacattttaaaatggctaaaatactgtatagaacttcctgccttcaggatggattataattcatttgagagaatagaaatgctttatccaaatttaagagatttggtagattctgtttctacttcagagctgaagaaagtaataaaagtaacaggcatcctcttcaggagcaacaccatgtgaattaatatgccaatgctaacatgtcatccccactactttttttgttcaatcactctcagtctagacatgtgagaagatcccaaacccaactgcacccctcccactcgaaatcagttgtagcctcagcagctccatctgccatgatctctgaccagcagcaaatgtattattattttaatttgtctatagttaacaaaaaattgatatctcacaggttgtaaacatagttcttttataattattgttagttaaactattgtgtttgacttcctttgggtatttttttcccgtgggtcggcatggcatctccacctcctcgcggtccgacctgggcatccgaaggaggacgcacgtccactcggatggctaagggagagcctgcagtagcataaccccttggggcctctaaacgggtcttgaggggttttttgctgaaaggaggaactatatacgcgtcgacgggcccgcgctcactggccgtcgttttacaacgtcgtgactgggaaaaccctggcgttacccaacttaatcgccttgcagcacatccccctttcgccagctggcgtaatagcgaagaggcccgcaccgatcgcccttcccaacagttgcgcagcctgaatggcgaatgggacgcgccctgtagcggcgcattaagcgcggcgggtgtggtggttacgcgcagcgtgaccgctacacttgccagcgccctagcgcccgctcctttcgctttcttcccttcctttctcgccacgttcgccggctttccccgtcaagctctaaatcgggggctccctttagggttccgatttagtgctttacggcacctcgaccccaaaaaacttgattagggtgatggttcacgtagtgggccatcgccctgatagacggtttttcgccctttgacgttggagtccacgttctttaatagtggactcttgttccaaactggaacaacactcaaccctatctcggtctattcttttgatttataagggattttgccgatttcggcctattggttaaaaaatgagctgatttaacaaaaatttaacgcgaattttaacaaaatattaacgcttacaatttaggtggcacttttcggggaaatgtgcgcggaacccctatttgtttatttttctaaatacattcaaatatgtatccgctcatgagacaataaccctgataaatgcttcaataatattgaaaaaggaagagtatgagtattcaacatttccgtgtcgcccttattcccttttttgcggcattttgccttcctgtttttgctcacccagaaacgctggtgaaagtaaaagatgctgaagatcagttgggtgcacgagtgggttacatcgaactggatctcaacagcggtaagatccttgagagttttcgccccgaagaacgttttccaatgatgagcacttttaaagttctgctatgtggcgcggtattatcccgtattgacgccgggcaagagcaactcggtcgccgcatacactattctcagaatgacttggttgagtactcaccagtcacagaaaagcatcttacggatggcatgacagtaagagaattatgcagtgctgccataaccatgagtgataacactgcggccaacttacttctgacaacgatcggaggaccgaaggagctaaccgcttttttgcacaacatgggggatcatgtaactcgccttgatcgttgggaaccggagctgaatgaagccataccaaacgacgagcgtgacaccacgatgcctgtagcaatggcaacaacgttgcgcaaactattaactggcgaactacttactctagcttcccggcaacaattaatagactggatggaggcggataaagttgcaggaccacttctgcgctcggcccttccggctggctggtttattgctgataaatctggagccggtgagcgtgggtctcgcggtatcattgcagcactggggccagatggtaagccctcccgtatcgtagttatctacacgacggggagtcaggcaactatggatgaacgaaatagacagatcgctgagataggtgcctcactgattaagcattggtaactgtcagaccaagtttactcatatatactttagattgatttaaaacttcatttttaatttaaaaggatctaggtgaagatcctttttgataatctcatgaccaaaatcccttaacgtgagttttcgttccactgagcgtcagaccccgtagaaaagatcaaaggatcttcttgagatcctttttttctgcgcgtaatctgctgcttgcaaacaaaaaaaccaccgctaccagcggtggtttgtttgccggatcaagagctaccaactctttttccgaaggtaactggcttcagcagagcgcagataccaaatactgtccttctagtgtagccgtagttaggccaccacttcaagaactctgtagcaccgcctacatacctcgctctgctaatcctgttaccagtggctgctgccagtggcgataagtcgtgtcttaccgggttggactcaagacgatagttaccggataaggcgcagcggtcgggctgaacggggggttcgtgcacacagcccagcttggagcgaacgacctacaccgaactgagatacctacagcgtgagctatgagaaagcgccacgcttcccgaagggagaaaggcggacaggtatccggtaagcggcagggtcggaacaggagagcgcacgagggagcttccagggggaaacgcctggtatctttatagtcctgtcgggtttcgccacctctgacttgagcgtcgatttttgtgatgctcgtcaggggggcggagcctatggaaaaacgccagcaacgcggcctttttacggttcctggccttttgctggccttttgctcacatgttctttcctgcgttatcccctgattctgtggataaccgtattaccgcctttgagtgagctgataccgctcgccgcagccgaacgaccgagcgcagcgagtcagtgagcgaggaagcggaagagcgcccaatacgcaaaccgcctctccccgcgcgttggccgattcattaatgcagctggcacgacaggtttcccgactggaaagcgggcagtgagcgcaacgcaattaatgtgagttagctcactcattaggcaccccaggctttacactttatgcttccggctcgtatgttgtgtggaattgtgagcggataacaatttcacacaggaaacagctatgaccatgattacgccaagcgcgcccgggtaatacgactcactataggg

SEQ ID NO: 25 - DNA, 18756 bp, synthetic construct
  source 1..18756: mol_type = other DNA
acgcgaaaaaatgcataacaaaactatcaacctgaaaaaagttaggacaagtgaagattgctagtcccaaagaccagaatcatgggctgtaatgtgatgatggagcttgattatggtggacgagctgcatggctggcattccacataaccaactttgataggtcagatttggaaactatcctaagaggtgctagggtgtgcaatacatggcaagatcagagactctccgtgtaccttgtgggaagggattgcaatttgttaagaccatttgtgcaagctgccaaatttatccataatactaggagaggccaaacattaacacattggttcacaaaaaatatcgtgtttagttctacagggcaagagacagagcctcccattgaccccacatgtgagctgttggtagagctgatcagtggttaagatgacagcacattatgtagttaattaaaacaaagggtaggacaagtcctaatgtccacagctatgaacaagttcactcagaccatctctaaacctgccactatcttgaatatttcagacagtgaagagtcgggcgatgaggcaggggtgggcaaggtgtcccgtaccacacagagctcagagaggtggcttgatttgctcattgaaaagttccagccgagcctacaaaacatcactagatacatcaactggaacttcatcaggatctgcaatgataggcttaaaaaagaaaaaatggggtacattgaggccaagcaatatgtggaagacatggcttggatggtgatagcatctgaggcagacagcattgagtggaagtgcataaggaggcaggagaaagtgactggggtgaaatacccaaagttcttctttgtacaacacaaagaggactggattgagtgcacaggatgcattccgtacccaggccatgacttgatctatgatgaggatgatgatgactgagctgactcagatcactccaaccagcagagagatccatagttatagaaaaacattaggataaatacacatcctaggccgccaccatgttcgtgtttctggtgctgctgcctctggtgagctcccagtgcgtgaacctgaggacaaggacccagctgccccctgcctataccaattccttcacacggggcgtgtactatcccgacaaggtgtttagatctagcgtgctgcactccacacaggatctgtttctgcctttcttttctaacgtgacctggttccacgccatccacgtgagcggcaccaatggcacaaagcggttcgacaatccagtgctgccctttaacgatggcgtgtacttcgcctccaccgagaagtctaacatcatcagaggctggatctttggcaccacactggacagcaagacacagtccctgctgatcgtgaacaatgccaccaacgtggtcatcaaggtgtgcgagttccagttttgtaatgatccattcctgggcgtgtactatcacaagaacaataagtcttggatggagagcggcgtgtattcctctgccaacaattgcacatttgagtacgtgtcccagcccttcctgatggacctggagggcaagcagggcaatttcaagaacctgagggagttcgtgtttaagaatatcgatggctacttcaagatctactccaagcacaccccaatcaacctggtgcgcgacctgccacagggcttctctgccctggagccactggtggatctgcccatcggcatcaacatcacccggtttcagacactgctggccctgcacagaagctacctgacaccaggcgacagctcctctggatggaccgcaggagctgccgcctactatgtgggctatctgcagcccaggaccttcctgctgaagtacaacgagaatggcaccatcacagacgccgtggattgcgccctggatcccctgtctgagaccaagtgtacactgaagagctttaccgtggagaagggcatctatcagacaagcaatttcagggtgcagcctaccgagtccatcgtgcgctttcccaatatcacaaacctgtgcccttttggcgaggtgttcaacgcaacccgcttcgccagcgtgtacgcctggaataggaagcgcatctccaactgcgtggccgactattctgtgctgtacaacagcgcctccttctctacctttaagtgctatggcgtgagccccacaaagctgaatgacctgtgctttaccaacgtgtacgccgattccttcgtgatcaggggcgacgaggtgcgccagatcgcccctggccagacaggcaagatcgccgactacaattataagctgcctgacgatttcaccggctgcgtgatcgcctggaactctaacaatctggatagcaaagtgggcggcaactacaattatcggtaccggctgtttagaaagtctaatctgaagccattcgagagggacatctccacagagatctaccaggccggctctaagccctgcaatggcgtggagggctttaactgttatttccctctgcagagctacggcttccagccaacaaacggcgtgggctatcagccctaccgcgtggtggtgctgtcttttgagctgctgcacgcacctgcaacagtgtgcggaccaaagaagagcaccaatctggtgaagaacaagtgcgtgaacttcaacttcaacggactgaccggcacaggcgtgctgaccgagtccaacaagaagttcctgccttttcagcagttcggcagggacatcgcagataccacagacgccgtgcgcgaccctcagaccctggagatcctggatatcacaccatgctccttcggcggcgtgtctgtgatcacaccaggcaccaatacaagcaaccaggtggccgtgctgtatcagggcgtgaattgtaccgaggtgcccgtggcaatccacgcagatcagctgacccctacatggcgggtgtactctaccggcagcaacgtgttccagacaagagccggatgcctgatcggagccgagcacgtgaacaatagctatgagtgcgacatccctatcggcgccggcatctgtgcctcctaccagacccagacaaactccagagggtctgcctcctctgtggccagccagtccatcatcgcctataccatgagcctgggcgccgagaattccgtggcctactccaacaattctatcgccatccctaccaacttcacaatctccgtgaccacagagatcctgccagtgagcatgaccaagacatccgtggactgcacaatgtatatctgtggcgattccaccgagtgctctaacctgctgctgcagtacggctctttttgtacccagctgaatagagccctgacaggcatcgccgtggagcaggacaagaacacacaggaggtgttcgcccaggtgaagcagatctacaagaccccacccatcaaggactttggcggcttcaacttcagccagatcctgcccgatcctagcaagccatccaagcggtctcctatcgaggacctgctgttcaacaaggtgaccctggccgatgccggcttcatcaagcagtatggcgattgcctgggcgacatcgccgccagagacctgatctgtgcccagaagtttaatggcctgaccgtgctgcctccactgctgacagatgagatgatcgcccagtacacatctgccctgctggccggcaccatcacaagcggatggaccttcggcgcaggacccgccctgcagatcccctttcccatgcagatggcctatcggttcaacggcatcggcgtgacccagaatgtgctgtacgagaaccagaagctgatcgccaatcagtttaactccgccatcggcaagatccaggactctctgagctccacacccagcgccctgggcaagctgcagaacgtggtgaatcagaacgcccaggccctgaataccctggtgaagcagctgtctagcaacttcggcgccatctcctctgtgctgaatgatatcctgagcaggctggaccctccagaggcagaggtgcagatcgaccggctgatcacaggcagactgcagtccctgcagacctacgtgacacagcagctgatcagggcagcagagatcagggcctctgccaatctggccgccaccaagatgagcgagtgcgtgctgggccagtccaagagagtggacttttgtggcaagggctatcacctgatgagcttcccacagtccgcccctcacggagtggtgtttctgcacgtgacctacgtgccagcccaggagaagaacttcaccacagcaccagcaatctgccacgatggcaaggcacactttcctagggagggcgtgttcgtgagcaacggcacccactggtttgtgacacagcgcaatttctacgagccacagatcatcaccacagacaatacattcgtgtccggcaactgtgacgtggtcatcggcatcgtgaacaataccgtgtatgatcctctgcagccagagctggactcttttaaggaggagctggataagtacttcaagaatcacaccagccccgacgtggatctgggcgacatctctggcatcaatgccagcgtggtgaacatccagaaggagatcgacaggctgaacgaggtggccaagaatctgaacgagtccctgatcgatctgcaggagctgggcaagtatgagcagtacatcaagtggccctggtatatctggctgggcttcatcgccggcctgatcgccatcgtgatggtgaccatcatgctgtgctgtatgacaagctgctgttcctgcctgaagggctgctgttcttgtggcagctgctgtaagtttgatgaggacgatagcgagcctgtgctgaagggcgtgaagctgcactacacctgatagccacctatagcaagtgatgtagtatttagtctatgattagttatagaaaaacattaggataaatacacatcctaggccgggccaaaatgtctctagacagattgaagctcaatgatgtctcaaacaaggatagcctgctgtccaactgcaaatacagtgttaccagatccacaggcgatgtaaccagtgtgtctggtcatgctatgcagaaagcccttgcaaggacactcggcatgttcttacttactgccttcaaccgttgcgaagaagtggcagaaatagggctccaatatgccatgtccttgctaggcagagatgatagcatcaagatattaagagaagccggctacaatgtaaaatgtgtggacacacagctcaaggactttacaatcaaattacaaggaaaggaatacaaaatacaagtcctagatatagtgggaatagatgcagccaatttagctgatctagagatacaagccagaggagtggtagcaaaagaactcaaaacaggagccaggctacctgacaatcggaggcatgatgcaccagattgtggtgtgatagttctctgtattgcagcattagttgtttccaaattagctgcaggggacaggggaggacttgatgctgtggaaagaagggctttaaatgtgctgaaagccgagaaagccaggtaccccaacatggaggtcaagcagatagctgaaagtttttatgatctgtttgaaaggaagccttattacattgatgtcttcatcacttttggcctggcccagtctagtgtcaagggaggcagcaaagttgaggggctgttttcaggtctcttcatgaatgcatacggggcaggacaagttatgctgaggtggggtttactggcaaaatctgtcaagaacatcatgctaggccatgctagtgtacaagctgagatggaacaggtggttgaggtttacgaatatgctcagaagcaaggaggggaggcaggattctatcacatcagaaataatccaaaagcttcacttctctctttgaccaattgtcctaatttcaccagtgttgtgcttggcaatgctgcaggtttaggcatcatagggtcatataagggtgctcctaggaatagagaactctttgatgctgccaaagattatgcagaaagattaaaggacaacaatgtaattaactacagtgcattaaacttgactgcagaagaaagagagctgatcagccagcagctgaacattgttgatgacactcctgatgatgatatttaattaaaactggaaaatgtaggataaatatggagaaattcgcccccgaatttgttggcgaggatgctaacaagaaggcagaggagtttctcaaacatagatccttcccttcggaaaaaccactagctggtataccgaacactgccactcatgtcaccaaatataacatgccccctatattgcgtagctcattcaaactcccttccccgagagttgctgcaaatcttactgaaccctctgctccccctaccactccaccacccacacctccccagaacaaggaagagcagcccaaagagtctgatgttgacattgagactatgcatgtctgtaaggttcctgacaatccggaacacagcaagaagccatgctgctcagatgataccgatactaagaaaactaggaagccgatggtcacctttgtggaacccgaggagaaatttgtcggattgggagctagcttgtacagggagaccatgcagacctttgctgctgatggttatgatgaagaaagcaacctatcgtttgaggagactaaccaagagccgggttcttcatctgtagaacaaagactagatagaatagaggagaaattgtcctacataataggccttttaaacaccataatggtagcgactgctggacctaccactgctagagatgagattagagatgcccttataggcactagagaagaacttattgagatgatcaagtctgacatcttgactgtcaatgacagaatagtggccatggagaagctcagagatgaggaatgctccagagctgacactgatgatggatcagcctgttatttaacagacagagcaaggatactagataagatagtgtccagcaatgctgaagaggctaaggaagatttggatgttgatgacatcatgggcattaatttttagttaattaaaataacaacaggacaaataatggaggcctacttggtagagatgtaccatggtgtcccatatacagctgcagtacagctaaacttggttgaaaaacattcagccaacatatcactaactgtgtggataccgatgtttcaaacatctctaccaaagaactccgttatggacctgctacatgatgttacagtcatttgtacacagatatcaacagtgcatggtcccatgatcaaggtagatctgagctcttccaatgcaggtttagctaccatgccaaggcaattcttgataaatgctatcatagctttggatgactggggcaacatggattacgaagtgcctgttgcttttgataaaaagagcttctgtgtgacaattcttaagcctaaaaacatgctttacactgtacccagcattactcccactaatcgacctactcatgagctgatagctgtctgctctttccataacagggtaacattaaagtcattcaatatacctgtcttcatcagagcactgtctatcagacagcaggaccttgatagtgtggagcaggctataagctccgatgtggaccatgctataacaacagctagggtggctccctatgcagggcttacacttgtgatcaacatcacatccaccaaaggagcattcaaactgctaaaggcaggtagtcagattcttgcagaactgggtccctatctgacgcaggtgagcctacatgatgtgattatgaactggaaacatacaggcacttcctacatactcaagagctcctcaacaagtggatgaaaaagagaaagtcaccattgatcagctcaatccacaactacaaccccacgatttcacacagcacaacaaccaccgccaccaacatccacatgacaaccacacatacacacccacatacatatatacacatatcttagttaaataaaatcaggataaataatggatcctaacatgacctcacaccagatcaccctcgagatcaacatgaccagcagccgtattggcacatacactacaccagccccaacagctcttctccttgcatgtgccgtcatcaacacagtgtgtgcgctgataatggcctgcagcagtagaagcactgccacatcaggcattgtcagcagccaatgcacagttcatcccaatcaccctccaccaagttatggcgtcaatgtaactggtctgccgggtaacctatactcaaggaacactacataacattataaataacagaaattatccttcaataaaccccaggccagacagctttaccctgctagacgattcaatcagcccttgcagtatgtcgtctagttaacaaaaaaccggtaggataagtactatcctattggaaccaaacgagacctgtagagcagctcacacaagagaaccacaagctgacttcacctagtatgggaaggaacttagaagtgagtggcagcattaccaatttgaactttgagagaactcagcatcctgacacatttaggactgttgtaaaagtgaaccaaatgtgtaagcttattgcaggtgtgctcacaagtgctgctgtggcagtttgtgtgggggtcataatgtattctgttttcacatcaaaccacaaggccaactccacgcagaatgccacgacccggaacagcacatccacccctccccaaccaaccgccggtctgcccaccacagagcaagggaccatccccagattcaccaaaccccccaccaaaaccgccacccaccatgagatcacagagcccgtcaaaatggcaacaccttcagaggatccctaccaatgctccagcaatggttatttggaccgacctgatttacctgaaaatttcaaactcgtattggatgttatatgcaagcctccaggtcctgaacatcacaacaccagctgttatgagaaacgtgaaatcaacccaggaagtgtttgccctgatcttgtaacaatgaaggcaaacatgggcttaaacaatggtggtggggaggatgctgcaccttatatagaggttaccaccctttctacgtactccaacaaaagggcaatgtgtgtccacaatgggtgtgatcaaggcttctgtttcttcctttctggtttaagcactgatcaggagagagctgtgctagagcttggaggtcaacaggctatcatggagttgcattatgattcctactggaaacactattggagtaactctaattgtgttgttcccagaacaaactgcaacctgacagaccaaactgagattttgtttcctaggtttaacaacaagaatcagtctcagtgtaccacctgtgcagattcagctggcctagataacaaattttatctcacatgtgatgggcttttaagaaccctccctctagttggactacccagcctaagtcctcaggcttacaaagctgtacccacacaaactacaggcaccaccacggcaccaacatcagagacgaggcacccaacccctgcacccaggaggtccaaacctctcagtcggaagaagagagctttatgtggtgtagactcaagcagagaacccaaaccaacaatgccttactggtgtcctatgctccaattatttccaaggaggtctaattcttaagtgacctattcctgaattaacttcagaataagtaccaaccttatcagtagttaatgaaaactaagctttgatataataggacaaatatgattcctggcaggatctttctagtccttctggtgatcttcaacaccaagccaattcacccaaatacattaacagaaaaattctatgagtccacatgtagtgttgagactgcaggttataagagtgcccttagaacaggttggcatatgacagttatgtcaattaagttgtctcaaataaatattgagtcatgcaagagcagcaactcgttattggctcatgagcttgcaatctatagtagtgcagtggatgaattgagaacgttatcatccaatgccttgaagtccaaaaggaagaagaggttcctcggtttgattcttggtctcggagctgcagtcactgccggggtggctttagccaagacagtgcaacttgaaagtgagattgcattgattagagatgcagtgagaaatacaaatgaggctgttgttagcctaaccaacggcatgtcagtgttggctaaagtggtggatgatttgaaaaacttcatatctaaagaattactcccaaaaataaaccgagtctcttgtgatgtgcacgacatcactgccgtcattagattccaacagctcaacaaaagacttttggaagtatctcgtgaattttcatctaatgcaggattaacacacactgtttcatcttttatgttaacagaccgggaactcacctccattgtaggcggcatggctgtttcagcaggccaaaaagagataatgctatctagcaaagctataatgagaagaaatgggttagcaatattaagttcagtcaacgctgacacactggtttatgtaatacaactcccattatttggtgttatggacacagattgttgggtaataagaagttctatagactgtcataacatagcagacaagtatgcttgtttggctagagctgataatggctggtattgtcacaatgctggctcattatcatacttcccgtcgccaacggattgtgagatccacaatgggtatgctttctgtgacactctaaaaagtctaactgtacctgtaacatcacgagaatgcaactcaaacatgtataccactaactacgattgtaagatttccacaagtaaaacttatgtgagtacagcggtactgactacaatgggttgcttggtatcttgttatggtcataacagttgcacagtcatcaataatgacaaaggtataataaggactctgccagatggttgccactacatctccaacaaaggtgtggacagggttcaagtaggtaacactgtttactatcttagcaaagaagttggcaagtcaattgttgtcagaggggaaccattggtcttgaaatatgaccctttgagtttccctgacgataaatttgatgttgctataagagatgtggagcatagcatcaatcagacacgcacattcttgaaggcctctgatcagttattggacttaagtgaaaacagagagaataaaaatttaaacaagtcatatatactaacaactctgctcttcgttgtaatgcttattataataatggctgtcatagggttcattctgtataaggtattgaaaatgatcagagacaacaagttgaaatccaaaagtacacctggcctcacagttttatcatgacaattgtaccaaaccataattgagttagttaattaaaaacttaggataagtgacaatccagacccaacacctctttcaactctcaaggataaggtaggatgagtgtgagaccttgcaaatttgaggttcaagggttttgttccagagggaggaattgcaagtatagtcataaatattgggaatggcctttgaaaactcttatgctcaggcagaactacatgcttaataggatttataggttcctcgacaccaacacagatgcaatgtcagatgtcagcggatttgatgcaccacaaaggactgctgagtatgccttgggaaccataggtgtgctgaaaagttacctggaaaaaactaacaacatcactaaatcaatagcttgtggcagtttgatcactgtattgcagaacttggatgttggtctagtaatacaagcaagagatagcaacactgaggacaccaattacttgagaagttgcaacactatactgtcttatatagacaagatacacaagaagagacaaattattcacattctcaaaagactgccagtaggagtactatgcaatctgatccaatctgtcatctccatcgaggagaagataaattcttctatgaaaacagaatgataaggctgcctaaatactatccagccatactgcataagatgtatattattagagtaaatagaaacctcacttacgatgggtctggaccatccacaataatagatgcaggaaagtctgtggtgtggaatcgtgttgatgtgatagcttgtgtgaaagaggccttgtgctgcatagaattcagctggaataaccaagtgatcatagactttgattatagccaggccagatgatgtggactgtattcctttttttgtcagtaatcagttattaacccaaaattgttaattatgtagactttaagttaactaacttcatgttaattcaatagttatataaaaaaatattcgaattaggatcaatatggatcctattgatgaacaagaagttaatgtgtacttgccggatagctacttaaagggtgttatatcttttagtgaaactaatgctcttggcagctgtatcattggtagacctttcttgaaggatgactttactgccactacttcaatccgtaaccccctaattgaacataaaagaataagggacactaaattagtaaaaaatattgtttcaaaccctcaatataggttagtggagcctctccaaatgcagcatgagctcttgagtgtactatcgcccaatttcatattgcacactgccaacttaaggaaaattatacaaagaagtgttgacataacagataaaaagttgaaccccattttgcacattttgaatcttaattctcctaaccaagagggtaaggtgtcggaacggctaactaggctaattaagaaacatctctctcacatacctaattgggtaagcagctggtacaatatatgggtcaatcttaacaacttactgcaggagtaccgttcaaaggaagttatagaccataactgtgttctgactaggcaattgtctggaagtttcatacatgtggtcatgagtcaatatggagttgtgataattagcaaaaaaagtaaaagatatacaatgtgtacttataaccaattcctaacctggaaggaccttgccttgagcagatttaatgccaattatgtggtctggctaagtaatgtgttaaacacactcaacgaggggttgggattaaggtgtagattaaaaggtcatctgctcagtaagttgtacatttccactgacatctttttatcttcaacatctaatgaattttataatgtggtcaaggaatttgagggcttcatcatgtcactgatattgaaacaaactgaggaagccttatttagcacaaggttttataataacatgttgaacaacttaattgatgccattgatagggctcgactagagtatctggcccgctgtgccaattcagctgccaggattaatttacctagtacagatgttatgatagcatcattgggtgatatcttatctttgataaacgttttaggtgaatccaaccttaacaacttaagtgagttatattttatcttcaggatatttggtcaccctatggttgatgagaggaaggccatggatgcagtcagagataactgttgtgaaacaaagtttctgacggctaagaaccttgcatcgttaagaggagcatatgtttatagaattatcaaaggattcgtagcaaattataacaggtggccttacataaaaactagagtttgccttacaccaacatggattaactatcttgacaccaattcatgtccctcattattagagatgacagaagatgattttattgtgttagctggagtgcactttataagagaattccacatcccaaagctaactgatctggagattatattaaatgacaaggccatatctcctccaaaatcactcatttggtcatgctttccaaaaaactacatacctcaggttatacaagatgagtatgcccggaggtattgtagagctaaagcacctttgaagacaagacgtgtcttggagttctacttacaggacaaggatttcaagttggatcagctccatagagtagtagtgaaccaggactaccttaatgataaagaacatataatttctttaacaggaaaagaaagagagttgggtgttggtaggatgtttgccatgcaacctgggaagcagaggcaagtccaaattttagcagagaagctgttggctgataacatcctgcaattctttccggagacactgactagatacggtgatttggagctgcaaaagatactagagttaaaagctggactttcaaataaaaatgacagatctaaagactcctacaataattatataagtaggtgctcattaattactgatttaagtaaatttaaccaagcttttaggtacgagtcatcctgtgtgtgtagtgatcttttagatgagctacatgggactcaaagcttattctcttggctgcatttaacagtaccactgactactataatgtgtacatataggcatgcgccgccggacactggaaacaactataatgtagatgatattgctgagcagagtggactctaccgctaccacatgggcgggattgagggctggtgccagaagctctggacaacagaggccattgctttgctagatactgtagctgtgaagggccgtttccagctaacttcattaataaatggcgacaaccaaagtattgatatttcaaaaccaacaaggctggggaccaggactcaaagtgaagcagattatgatttggcaataaattctttaagattaatatcagcagcttataaaggcattggacataaattaaaagaaggtgagacctacttgtcacgtgacatgcagttcatgagtaaaacaatacaacatgaaggggtctactacccggcctccatcaagaaaatattaagagttggtccctggatcaacacaatattagatgatataaaaacttcaacagaaagtattggttctctaactcaagaactagaatataaaggtgaaagtttaatgagcagcctgctgctgaggaacttctggctctacagattatattcagtggatttaaaagatcattctttgtgtggaaagcagctctacagatccttaataaaagtgttaaaacatttgaagaggtgcttcaacctggagaaccttggggaatgtttggaattatttttaaatgtgcccatgcagtttggaggtgctgacccaaatgtcatctacaggagcttctacagaagaactccagattttctaacagaaagtataactcatctcatcctcattttaaaacattttagaagagatttggaattcaacaaagataatgtctccaaagctgttctttctttgctagagttcaccaagaatgattctgcagaatttgtaactttgatgagagatcctcaagcaattggtagtgagaggcaggccaagatcacttcagacatcaacagaacagctgtaacttcagtgttatcaaatgctccaaatgaaatatttagaacttcagctcttcattacagcagcacagaaaatgaattaaatggaatagcaagtggagtttctcctgtttatcctcatggtcttcgagttttatatgaaagtttacctttttataaagcagagaagattgtcaacatggtttctgggaccaagtccatcaccaacatactggagaagacatcagccatctcctacacagatataattcgagccaccaacatgatggtggagaacctcactttgctaacaagaataatgaaaccaggtgctgacacatctttggatcctgacacaatagtaataacaatattatcaaaaataataagagataaatcctgggatgttggtgatataattggtgtcacttccccatctcctgtctcctgcttcaaggtggtctacacatcaactctacaaaataattcagtagtaatagaaagatacacaacagacacctacacaagaggtaagagaggccccaccaagccctgggtgggcagcagcacacaggagaagaagtccatgcctgtctacaacagacaagttttaacaagaggacaaagagatcaaatagaaaatatagcaaagctggagtgggtgttttcttcagtagcaaatattgattctttgctaaatgagctcagcaccatgactttgggtctttctctaaggaaatgtagacaactttttccaacatatttaagtttaaacttcctgcacaggctttctgtcagcagcaggcccagagaatatccttcttctcttcctgcctacaggacaacaaattttcattttgatactggaccaataaataaagtgttaacagaaagatttggagatgaagatataaatttggtatttcaaaatgcaatatcatatggtctttccaccatgtctttggtggagcagtttactggtgtctgtccaaataaagttttgctggtgcccaagctacaagaaatacaactaatgaaagttccaatatttcaaggtggcttcaacctacaaagtataattccaataataaggcagcagcacatgttcctgcccaaccacatcactccagcccagtatattgaattatttctttcttcaaaacaatttcattcaagaataaatttaaaacacaacaacagatttaaacttgttttacaaaaagattattttaatggggagaacatgatagaaactttgtccacctgtttggcaggccactggatcatcattttgatgctaatgaaggagagtcaggggatatttgacaaggagtggtatgatggttttgtaacagaccacatgttcctggacctgcagctcttcctctcctccttcaagacatttctaactgtcttcaactttgcttatttaaaagttggttcaaatatagaagaaataacaggaaatcaagccaacctgctggagctgctggacctgggctactggaagaacatgtataaagtattttcagagaccaaggtgcggctggctttgctaaaacaagatttatcatttaattctgtgaagaacagcagcagcttccggcactggtttataaattctctacaagaagtacaatgtacttctgtgccttgggtggtaaatgtaacaagaaatccaactcatttaaaaggtgttctacagtacatgaagatgatagaaagtggcatgattcaaggttattcagcaaatatttcttcagttttaagtatcccatataattatccagacatggcgcacatgatgacaaaaataataagaaatcgaggccacatgtcctatgattatccaaagatgaagaaaagtttaactttctccatgacagacatgagtgacagctacatgctcaacctcttccccaaagtagaatgttcttacatgagtggttatttggataaactagatgatactctacaacttctaaagaaacctcctgttggaagaaaagttccttctgtggctttgccctggcaccactgcaacagatacaactttgtcttcagcagcacaggctgcaaagtttctgtcattgacatgcttccaaaacatttccgaagaagtaatttaaaagtaatatgttttattggagaaggggcgggcaacctcatgctaagagctgttttggaagttggtggaaatataaaattaatatatagatccttaaaagatcctgatgatcatcatgttcctgtagaatttctaagattaaaaccttgttatccttatattgatactggtggcagtttatctttggcttcaacagatgccaccaacaaggcccactgggattatttacatcttcactggacagatcctttaaatttaatagtatgtgatgcagaaataagtggtgtgaagcactggctaaaaattcttcacaggtggtatgagcacatgacttcctgcaagcactgtttaaaatcagaacatgataaatatttaataataaaatatcatgctcaagatgatttaatagatcttcctcatggtgtcaggctactaaaatgtaacatctgcctgggctccaaactaagtggcagtgagagctacctgctcattggtcttggtctttcaaataaacttcctgtctacagtgaagttcttcattcaaaacttcttttggcagaatgtcatcagtttcatcatccaaaatatttggatgtttctggaataaatacaaatataaaatccttaataccaatgttggattatccaataacttacaacaagatcaccactttgctagaaagtgtgcgggagctttcttcaaataaaaacaagaacaccatgtggattggaagaaatcctgtctaccataataaatggctaaagaggaaatatttcaacattttaaaatggctaaaatactgtatagaacttcctgccttcaggatggattataattcatttgagagaatagaaatgctttatccaaatttaagagatttggtagattctgtttctacttcagagctgaagaaagtaataaaagtaacaggcatcctcttcaggagcaacaccatgtgaattaatatgccaatgctaacatgtcatccccactactttttttgttcaatcactctcagtctagacatgtgagaagatcccaaacccaactgcacccctcccactcgaaatcagttgtagcctcagcagctccatctgccatgatctctgaccagcagcaaatgtattattattttaatttgtctatagttaacaaaaaattgatatctcacaggttgtaaacatagttcttttataattattgttagttaaactattgtgtttgacttcctttgggtatttttttcccgt

SEQ ID NO: 26 - DNA, 21748 bp, synthetic construct
  source 1..21748: mol_type = other DNA
acgcgaaaaaatgcataacaaaactatcaacctgaaaaaagttaggacaagtgaagattgctagtcccaaagaccagaatcatgggctgtaatgtgatgatggagcttgattatggtggacgagctgcatggctggcattccacataaccaactttgataggtcagatttggaaactatcctaagaggtgctagggtgtgcaatacatggcaagatcagagactctccgtgtaccttgtgggaagggattgcaatttgttaagaccatttgtgcaagctgccaaatttatccataatactaggagaggccaaacattaacacattggttcacaaaaaatatcgtgtttagttctacagggcaagagacagagcctcccattgaccccacatgtgagctgttggtagagctgatcagtggttaagatgacagcacattatgtagttaattaaaacaaagggtaggacaagtcctaatgtccacagctatgaacaagttcactcagaccatctctaaacctgccactatcttgaatatttcagacagtgaagagtcgggcgatgaggcaggggtgggcaaggtgtcccgtaccacacagagctcagagaggtggcttgatttgctcattgaaaagttccagccgagcctacaaaacatcactagatacatcaactggaacttcatcaggatctgcaatgataggcttaaaaaagaaaaaatggggtacattgaggccaagcaatatgtggaagacatggcttggatggtgatagcatctgaggcagacagcattgagtggaagtgcataaggaggcaggagaaagtgactggggtgaaatacccaaagttcttctttgtacaacacaaagaggactggattgagtgcacaggatgcattccgtacccaggccatgacttgatctatgatgaggatgatgatgactgagctgactcagatcactccaaccagcagagagatccatagttatagaaaaacattaggataaatacacatcctaggccgccaccatgttcgtgtttctggtgctgctgcctctggtgagctcccagtgcgtgaacctgaggacaaggacccagctgccccctgcctataccaattccttcacacggggcgtgtactatcccgacaaggtgtttagatctagcgtgctgcactccacacaggatctgtttctgcctttcttttctaacgtgacctggttccacgccatccacgtgagcggcaccaatggcacaaagcggttcgacaatccagtgctgccctttaacgatggcgtgtacttcgcctccaccgagaagtctaacatcatcagaggctggatctttggcaccacactggacagcaagacacagtccctgctgatcgtgaacaatgccaccaacgtggtcatcaaggtgtgcgagttccagttttgtaatgatccattcctgggcgtgtactatcacaagaacaataagtcttggatggagagcggcgtgtattcctctgccaacaattgcacatttgagtacgtgtcccagcccttcctgatggacctggagggcaagcagggcaatttcaagaacctgagggagttcgtgtttaagaatatcgatggctacttcaagatctactccaagcacaccccaatcaacctggtgcgcgacctgccacagggcttctctgccctggagccactggtggatctgcccatcggcatcaacatcacccggtttcagacactgctggccctgcacagaagctacctgacaccaggcgacagctcctctggatggaccgcaggagctgccgcctactatgtgggctatctgcagcccaggaccttcctgctgaagtacaacgagaatggcaccatcacagacgccgtggattgcgccctggatcccctgtctgagaccaagtgtacactgaagagctttaccgtggagaagggcatctatcagacaagcaatttcagggtgcagcctaccgagtccatcgtgcgctttcccaatatcacaaacctgtgcccttttggcgaggtgttcaacgcaacccgcttcgccagcgtgtacgcctggaataggaagcgcatctccaactgcgtggccgactattctgtgctgtacaacagcgcctccttctctacctttaagtgctatggcgtgagccccacaaagctgaatgacctgtgctttaccaacgtgtacgccgattccttcgtgatcaggggcgacgaggtgcgccagatcgcccctggccagacaggcaagatcgccgactacaattataagctgcctgacgatttcaccggctgcgtgatcgcctggaactctaacaatctggatagcaaagtgggcggcaactacaattatcggtaccggctgtttagaaagtctaatctgaagccattcgagagggacatctccacagagatctaccaggccggctctaagccctgcaatggcgtggagggctttaactgttatttccctctgcagagctacggcttccagccaacaaacggcgtgggctatcagccctaccgcgtggtggtgctgtcttttgagctgctgcacgcacctgcaacagtgtgcggaccaaagaagagcaccaatctggtgaagaacaagtgcgtgaacttcaacttcaacggactgaccggcacaggcgtgctgaccgagtccaacaagaagttcctgccttttcagcagttcggcagggacatcgcagataccacagacgccgtgcgcgaccctcagaccctggagatcctggatatcacaccatgctccttcggcggcgtgtctgtgatcacaccaggcaccaatacaagcaaccaggtggccgtgctgtatcagggcgtgaattgtaccgaggtgcccgtggcaatccacgcagatcagctgacccctacatggcgggtgtactctaccggcagcaacgtgttccagacaagagccggatgcctgatcggagccgagcacgtgaacaatagctatgagtgcgacatccctatcggcgccggcatctgtgcctcctaccagacccagacaaactccagagggtctgcctcctctgtggccagccagtccatcatcgcctataccatgagcctgggcgccgagaattccgtggcctactccaacaattctatcgccatccctaccaacttcacaatctccgtgaccacagagatcctgccagtgagcatgaccaagacatccgtggactgcacaatgtatatctgtggcgattccaccgagtgctctaacctgctgctgcagtacggctctttttgtacccagctgaatagagccctgacaggcatcgccgtggagcaggacaagaacacacaggaggtgttcgcccaggtgaagcagatctacaagaccccacccatcaaggactttggcggcttcaacttcagccagatcctgcccgatcctagcaagccatccaagcggtctcctatcgaggacctgctgttcaacaaggtgaccctggccgatgccggcttcatcaagcagtatggcgattgcctgggcgacatcgccgccagagacctgatctgtgcccagaagtttaatggcctgaccgtgctgcctccactgctgacagatgagatgatcgcccagtacacatctgccctgctggccggcaccatcacaagcggatggaccttcggcgcaggacccgccctgcagatcccctttcccatgcagatggcctatcggttcaacggcatcggcgtgacccagaatgtgctgtacgagaaccagaagctgatcgccaatcagtttaactccgccatcggcaagatccaggactctctgagctccacacccagcgccctgggcaagctgcagaacgtggtgaatcagaacgcccaggccctgaataccctggtgaagcagctgtctagcaacttcggcgccatctcctctgtgctgaatgatatcctgagcaggctggaccctccagaggcagaggtgcagatcgaccggctgatcacaggcagactgcagtccctgcagacctacgtgacacagcagctgatcagggcagcagagatcagggcctctgccaatctggccgccaccaagatgagcgagtgcgtgctgggccagtccaagagagtggacttttgtggcaagggctatcacctgatgagcttcccacagtccgcccctcacggagtggtgtttctgcacgtgacctacgtgccagcccaggagaagaacttcaccacagcaccagcaatctgccacgatggcaaggcacactttcctagggagggcgtgttcgtgagcaacggcacccactggtttgtgacacagcgcaatttctacgagccacagatcatcaccacagacaatacattcgtgtccggcaactgtgacgtggtcatcggcatcgtgaacaataccgtgtatgatcctctgcagccagagctggactcttttaaggaggagctggataagtacttcaagaatcacaccagccccgacgtggatctgggcgacatctctggcatcaatgccagcgtggtgaacatccagaaggagatcgacaggctgaacgaggtggccaagaatctgaacgagtccctgatcgatctgcaggagctgggcaagtatgagcagtacatcaagtggccctggtatatctggctgggcttcatcgccggcctgatcgccatcgtgatggtgaccatcatgctgtgctgtatgacaagctgctgttcctgcctgaagggctgctgttcttgtggcagctgctgtaagtttgatgaggacgatagcgagcctgtgctgaagggcgtgaagctgcactacacctgatagccacctatagcaagtgatgtagtatttagtctatgattagttatagaaaaacattaggataaatacacatcctaggccgggccaaaatgtctctagacagattgaagctcaatgatgtctcaaacaaggatagcctgctgtccaactgcaaatacagtgttaccagatccacaggcgatgtaaccagtgtgtctggtcatgctatgcagaaagcccttgcaaggacactcggcatgttcttacttactgccttcaaccgttgcgaagaagtggcagaaatagggctccaatatgccatgtccttgctaggcagagatgatagcatcaagatattaagagaagccggctacaatgtaaaatgtgtggacacacagctcaaggactttacaatcaaattacaaggaaaggaatacaaaatacaagtcctagatatagtgggaatagatgcagccaatttagctgatctagagatacaagccagaggagtggtagcaaaagaactcaaaacaggagccaggctacctgacaatcggaggcatgatgcaccagattgtggtgtgatagttctctgtattgcagcattagttgtttccaaattagctgcaggggacaggggaggacttgatgctgtggaaagaagggctttaaatgtgctgaaagccgagaaagccaggtaccccaacatggaggtcaagcagatagctgaaagtttttatgatctgtttgaaaggaagccttattacattgatgtcttcatcacttttggcctggcccagtctagtgtcaagggaggcagcaaagttgaggggctgttttcaggtctcttcatgaatgcatacggggcaggacaagttatgctgaggtggggtttactggcaaaatctgtcaagaacatcatgctaggccatgctagtgtacaagctgagatggaacaggtggttgaggtttacgaatatgctcagaagcaaggaggggaggcaggattctatcacatcagaaataatccaaaagcttcacttctctctttgaccaattgtcctaatttcaccagtgttgtgcttggcaatgctgcaggtttaggcatcatagggtcatataagggtgctcctaggaatagagaactctttgatgctgccaaagattatgcagaaagattaaaggacaacaatgtaattaactacagtgcattaaacttgactgcagaagaaagagagctgatcagccagcagctgaacattgttgatgacactcctgatgatgatatttaattaaaactggaaaatgtaggataaatatggagaaattcgcccccgaatttgttggcgaggatgctaacaagaaggcagaggagtttctcaaacatagatccttcccttcggaaaaaccactagctggtataccgaacactgccactcatgtcaccaaatataacatgccccctatattgcgtagctcattcaaactcccttccccgagagttgctgcaaatcttactgaaccctctgctccccctaccactccaccacccacacctccccagaacaaggaagagcagcccaaagagtctgatgttgacattgagactatgcatgtctgtaaggttcctgacaatccggaacacagcaagaagccatgctgctcagatgataccgatactaagaaaactaggaagccgatggtcacctttgtggaacccgaggagaaatttgtcggattgggagctagcttgtacagggagaccatgcagacctttgctgctgatggttatgatgaagaaagcaacctatcgtttgaggagactaaccaagagccgggttcttcatctgtagaacaaagactagatagaatagaggagaaattgtcctacataataggccttttaaacaccataatggtagcgactgctggacctaccactgctagagatgagattagagatgcccttataggcactagagaagaacttattgagatgatcaagtctgacatcttgactgtcaatgacagaatagtggccatggagaagctcagagatgaggaatgctccagagctgacactgatgatggatcagcctgttatttaacagacagagcaaggatactagataagatagtgtccagcaatgctgaagaggctaaggaagatttggatgttgatgacatcatgggcattaatttttagttaattaaaataacaacaggacaaataatggaggcctacttggtagagatgtaccatggtgtcccatatacagctgcagtacagctaaacttggttgaaaaacattcagccaacatatcactaactgtgtggataccgatgtttcaaacatctctaccaaagaactccgttatggacctgctacatgatgttacagtcatttgtacacagatatcaacagtgcatggtcccatgatcaaggtagatctgagctcttccaatgcaggtttagctaccatgccaaggcaattcttgataaatgctatcatagctttggatgactggggcaacatggattacgaagtgcctgttgcttttgataaaaagagcttctgtgtgacaattcttaagcctaaaaacatgctttacactgtacccagcattactcccactaatcgacctactcatgagctgatagctgtctgctctttccataacagggtaacattaaagtcattcaatatacctgtcttcatcagagcactgtctatcagacagcaggaccttgatagtgtggagcaggctataagctccgatgtggaccatgctataacaacagctagggtggctccctatgcagggcttacacttgtgatcaacatcacatccaccaaaggagcattcaaactgctaaaggcaggtagtcagattcttgcagaactgggtccctatctgacgcaggtgagcctacatgatgtgattatgaactggaaacatacaggcacttcctacatactcaagagctcctcaacaagtggatgaaaaagagaaagtcaccattgatcagctcaatccacaactacaaccccacgatttcacacagcacaacaaccaccgccaccaacatccacatgacaaccacacatacacacccacatacatatatacacatatcttagttaaataaaatcaggataaataatggatcctaacatgacctcacaccagatcaccctcgagatcaacatgaccagcagccgtattggcacatacactacaccagccccaacagctcttctccttgcatgtgccgtcatcaacacagtgtgtgcgctgataatggcctgcagcagtagaagcactgccacatcaggcattgtcagcagccaatgcacagttcatcccaatcaccctccaccaagttatggcgtcaatgtaactggtctgccgggtaacctatactcaaggaacactacataacattataaataacagaaattatccttcaataaaccccaggccagacagctttaccctgctagacgattcaatcagcccttgcagtatgtcgtctagttaacaaaaaaccggtaggataagtactatcctattggaaccaaacgagacctgtagagcagctcacacaagagaaccacaagctgacttcacctagtatgggaaggaacttagaagtgagtggcagcattaccaatttgaactttgagagaactcagcatcctgacacatttaggactgttgtaaaagtgaaccaaatgtgtaagcttattgcaggtgtgctcacaagtgctgctgtggcagtttgtgtgggggtcataatgtattctgttttcacatcaaaccacaaggccaactccacgcagaatgccacgacccggaacagcacatccacccctccccaaccaaccgccggtctgcccaccacagagcaagggaccatccccagattcaccaaaccccccaccaaaaccgccacccaccatgagatcacagagcccgtcaaaatggcaacaccttcagaggatccctaccaatgctccagcaatggttatttggaccgacctgatttacctgaaaatttcaaactcgtattggatgttatatgcaagcctccaggtcctgaacatcacaacaccagctgttatgagaaacgtgaaatcaacccaggaagtgtttgccctgatcttgtaacaatgaaggcaaacatgggcttaaacaatggtggtggggaggatgctgcaccttatatagaggttaccaccctttctacgtactccaacaaaagggcaatgtgtgtccacaatgggtgtgatcaaggcttctgtttcttcctttctggtttaagcactgatcaggagagagctgtgctagagcttggaggtcaacaggctatcatggagttgcattatgattcctactggaaacactattggagtaactctaattgtgttgttcccagaacaaactgcaacctgacagaccaaactgagattttgtttcctaggtttaacaacaagaatcagtctcagtgtaccacctgtgcagattcagctggcctagataacaaattttatctcacatgtgatgggcttttaagaaccctccctctagttggactacccagcctaagtcctcaggcttacaaagctgtacccacacaaactacaggcaccaccacggcaccaacatcagagacgaggcacccaacccctgcacccaggaggtccaaacctctcagtcggaagaagagagctttatgtggtgtagactcaagcagagaacccaaaccaacaatgccttactggtgtcctatgctccaattatttccaaggaggtctaattcttaagtgacctattcctgaattaacttcagaataagtaccaaccttatcagtagttaatgaaaactaagctttgatataataggacaaatatgattcctggcaggatctttctagtccttctggtgatcttcaacaccaagccaattcacccaaatacattaacagaaaaattctatgagtccacatgtagtgttgagactgcaggttataagagtgcccttagaacaggttggcatatgacagttatgtcaattaagttgtctcaaataaatattgagtcatgcaagagcagcaactcgttattggctcatgagcttgcaatctatagtagtgcagtggatgaattgagaacgttatcatccaatgccttgaagtccaaaaggaagaagaggttcctcggtttgattcttggtctcggagctgcagtcactgccggggtggctttagccaagacagtgcaacttgaaagtgagattgcattgattagagatgcagtgagaaatacaaatgaggctgttgttagcctaaccaacggcatgtcagtgttggctaaagtggtggatgatttgaaaaacttcatatctaaagaattactcccaaaaataaaccgagtctcttgtgatgtgcacgacatcactgccgtcattagattccaacagctcaacaaaagacttttggaagtatctcgtgaattttcatctaatgcaggattaacacacactgtttcatcttttatgttaacagaccgggaactcacctccattgtaggcggcatggctgtttcagcaggccaaaaagagataatgctatctagcaaagctataatgagaagaaatgggttagcaatattaagttcagtcaacgctgacacactggtttatgtaatacaactcccattatttggtgttatggacacagattgttgggtaataagaagttctatagactgtcataacatagcagacaagtatgcttgtttggctagagctgataatggctggtattgtcacaatgctggctcattatcatacttcccgtcgccaacggattgtgagatccacaatgggtatgctttctgtgacactctaaaaagtctaactgtacctgtaacatcacgagaatgcaactcaaacatgtataccactaactacgattgtaagatttccacaagtaaaacttatgtgagtacagcggtactgactacaatgggttgcttggtatcttgttatggtcataacagttgcacagtcatcaataatgacaaaggtataataaggactctgccagatggttgccactacatctccaacaaaggtgtggacagggttcaagtaggtaacactgtttactatcttagcaaagaagttggcaagtcaattgttgtcagaggggaaccattggtcttgaaatatgaccctttgagtttccctgacgataaatttgatgttgctataagagatgtggagcatagcatcaatcagacacgcacattcttgaaggcctctgatcagttattggacttaagtgaaaacagagagaataaaaatttaaacaagtcatatatactaacaactctgctcttcgttgtaatgcttattataataatggctgtcatagggttcattctgtataaggtattgaaaatgatcagagacaacaagttgaaatccaaaagtacacctggcctcacagttttatcatgacaattgtaccaaaccataattgagttagttaattaaaaacttaggataagtgacaatccagacccaacacctctttcaactctcaaggataaggtaggatgagtgtgagaccttgcaaatttgaggttcaagggttttgttccagagggaggaattgcaagtatagtcataaatattgggaatggcctttgaaaactcttatgctcaggcagaactacatgcttaataggatttataggttcctcgacaccaacacagatgcaatgtcagatgtcagcggatttgatgcaccacaaaggactgctgagtatgccttgggaaccataggtgtgctgaaaagttacctggaaaaaactaacaacatcactaaatcaatagcttgtggcagtttgatcactgtattgcagaacttggatgttggtctagtaatacaagcaagagatagcaacactgaggacaccaattacttgagaagttgcaacactatactgtcttatatagacaagatacacaagaagagacaaattattcacattctcaaaagactgccagtaggagtactatgcaatctgatccaatctgtcatctccatcgaggagaagataaattcttctatgaaaacagaatgataaggctgcctaaatactatccagccatactgcataagatgtatattattagagtaaatagaaacctcacttacgatgggtctggaccatccacaataatagatgcaggaaagtctgtggtgtggaatcgtgttgatgtgatagcttgtgtgaaagaggccttgtgctgcatagaattcagctggaataaccaagtgatcatagactttgattatagccaggccagatgatgtggactgtattcctttttttgtcagtaatcagttattaacccaaaattgttaattatgtagactttaagttaactaacttcatgttaattcaatagttatataaaaaaatattcgaattaggatcaatatggatcctattgatgaacaagaagttaatgtgtacttgccggatagctacttaaagggtgttatatcttttagtgaaactaatgctcttggcagctgtatcattggtagacctttcttgaaggatgactttactgccactacttcaatccgtaaccccctaattgaacataaaagaataagggacactaaattagtaaaaaatattgtttcaaaccctcaatataggttagtggagcctctccaaatgcagcatgagctcttgagtgtactatcgcccaatttcatattgcacactgccaacttaaggaaaattatacaaagaagtgttgacataacagataaaaagttgaaccccattttgcacattttgaatcttaattctcctaaccaagagggtaaggtgtcggaacggctaactaggctaattaagaaacatctctctcacatacctaattgggtaagcagctggtacaatatatgggtcaatcttaacaacttactgcaggagtaccgttcaaaggaagttatagaccataactgtgttctgactaggcaattgtctggaagtttcatacatgtggtcatgagtcaatatggagttgtgataattagcaaaaaaagtaaaagatatacaatgtgtacttataaccaattcctaacctggaaggaccttgccttgagcagatttaatgccaattatgtggtctggctaagtaatgtgttaaacacactcaacgaggggttgggattaaggtgtagattaaaaggtcatctgctcagtaagttgtacatttccactgacatctttttatcttcaacatctaatgaattttataatgtggtcaaggaatttgagggcttcatcatgtcactgatattgaaacaaactgaggaagccttatttagcacaaggttttataataacatgttgaacaacttaattgatgccattgatagggctcgactagagtatctggcccgctgtgccaattcagctgccaggattaatttacctagtacagatgttatgatagcatcattgggtgatatcttatctttgataaacgttttaggtgaatccaaccttaacaacttaagtgagttatattttatcttcaggatatttggtcaccctatggttgatgagaggaaggccatggatgcagtcagagataactgttgtgaaacaaagtttctgacggctaagaaccttgcatcgttaagaggagcatatgtttatagaattatcaaaggattcgtagcaaattataacaggtggccttacataaaaactagagtttgccttacaccaacatggattaactatcttgacaccaattcatgtccctcattattagagatgacagaagatgattttattgtgttagctggagtgcactttataagagaattccacatcccaaagctaactgatctggagattatattaaatgacaaggccatatctcctccaaaatcactcatttggtcatgctttccaaaaaactacatacctcaggttatacaagatgagtatgcccggaggtattgtagagctaaagcacctttgaagacaagacgtgtcttggagttctacttacaggacaaggatttcaagttggatcagctccatagagtagtagtgaaccaggactaccttaatgataaagaacatataatttctttaacaggaaaagaaagagagttgggtgttggtaggatgtttgccatgcaacctgggaagcagaggcaagtccaaattttagcagagaagctgttggctgataacatcctgcaattctttccggagacactgactagatacggtgatttggagctgcaaaagatactagagttaaaagctggactttcaaataaaaatgacagatctaaagactcctacaataattatataagtaggtgctcattaattactgatttaagtaaatttaaccaagcttttaggtacgagtcatcctgtgtgtgtagtgatcttttagatgagctacatgggactcaaagcttattctcttggctgcatttaacagtaccactgactactataatgtgtacatataggcatgcgccgccggacactggaaacaactataatgtagatgatattgctgagcagagtggactctaccgctaccacatgggcgggattgagggctggtgccagaagctctggacaacagaggccattgctttgctagatactgtagctgtgaagggccgtttccagctaacttcattaataaatggcgacaaccaaagtattgatatttcaaaaccaacaaggctggggaccaggactcaaagtgaagcagattatgatttggcaataaattctttaagattaatatcagcagcttataaaggcattggacataaattaaaagaaggtgagacctacttgtcacgtgacatgcagttcatgagtaaaacaatacaacatgaaggggtctactacccggcctccatcaagaaaatattaagagttggtccctggatcaacacaatattagatgatataaaaacttcaacagaaagtattggttctctaactcaagaactagaatataaaggtgaaagtttaatgagcagcctgctgctgaggaacttctggctctacagattatattcagtggatttaaaagatcattctttgtgtggaaagcagctctacagatccttaataaaagtgttaaaacatttgaagaggtgcttcaacctggagaaccttggggaatgtttggaattatttttaaatgtgcccatgcagtttggaggtgctgacccaaatgtcatctacaggagcttctacagaagaactccagattttctaacagaaagtataactcatctcatcctcattttaaaacattttagaagagatttggaattcaacaaagataatgtctccaaagctgttctttctttgctagagttcaccaagaatgattctgcagaatttgtaactttgatgagagatcctcaagcaattggtagtgagaggcaggccaagatcacttcagacatcaacagaacagctgtaacttcagtgttatcaaatgctccaaatgaaatatttagaacttcagctcttcattacagcagcacagaaaatgaattaaatggaatagcaagtggagtttctcctgtttatcctcatggtcttcgagttttatatgaaagtttacctttttataaagcagagaagattgtcaacatggtttctgggaccaagtccatcaccaacatactggagaagacatcagccatctcctacacagatataattcgagccaccaacatgatggtggagaacctcactttgctaacaagaataatgaaaccaggtgctgacacatctttggatcctgacacaatagtaataacaatattatcaaaaataataagagataaatcctgggatgttggtgatataattggtgtcacttccccatctcctgtctcctgcttcaaggtggtctacacatcaactctacaaaataattcagtagtaatagaaagatacacaacagacacctacacaagaggtaagagaggccccaccaagccctgggtgggcagcagcacacaggagaagaagtccatgcctgtctacaacagacaagttttaacaagaggacaaagagatcaaatagaaaatatagcaaagctggagtgggtgttttcttcagtagcaaatattgattctttgctaaatgagctcagcaccatgactttgggtctttctctaaggaaatgtagacaactttttccaacatatttaagtttaaacttcctgcacaggctttctgtcagcagcaggcccagagaatatccttcttctcttcctgcctacaggacaacaaattttcattttgatactggaccaataaataaagtgttaacagaaagatttggagatgaagatataaatttggtatttcaaaatgcaatatcatatggtctttccaccatgtctttggtggagcagtttactggtgtctgtccaaataaagttttgctggtgcccaagctacaagaaatacaactaatgaaagttccaatatttcaaggtggcttcaacctacaaagtataattccaataataaggcagcagcacatgttcctgcccaaccacatcactccagcccagtatattgaattatttctttcttcaaaacaatttcattcaagaataaatttaaaacacaacaacagatttaaacttgttttacaaaaagattattttaatggggagaacatgatagaaactttgtccacctgtttggcaggccactggatcatcattttgatgctaatgaaggagagtcaggggatatttgacaaggagtggtatgatggttttgtaacagaccacatgttcctggacctgcagctcttcctctcctccttcaagacatttctaactgtcttcaactttgcttatttaaaagttggttcaaatatagaagaaataacaggaaatcaagccaacctgctggagctgctggacctgggctactggaagaacatgtataaagtattttcagagaccaaggtgcggctggctttgctaaaacaagatttatcatttaattctgtgaagaacagcagcagcttccggcactggtttataaattctctacaagaagtacaatgtacttctgtgccttgggtggtaaatgtaacaagaaatccaactcatttaaaaggtgttctacagtacatgaagatgatagaaagtggcatgattcaaggttattcagcaaatatttcttcagttttaagtatcccatataattatccagacatggcgcacatgatgacaaaaataataagaaatcgaggccacatgtcctatgattatccaaagatgaagaaaagtttaactttctccatgacagacatgagtgacagctacatgctcaacctcttccccaaagtagaatgttcttacatgagtggttatttggataaactagatgatactctacaacttctaaagaaacctcctgttggaagaaaagttccttctgtggctttgccctggcaccactgcaacagatacaactttgtcttcagcagcacaggctgcaaagtttctgtcattgacatgcttccaaaacatttccgaagaagtaatttaaaagtaatatgttttattggagaaggggcgggcaacctcatgctaagagctgttttggaagttggtggaaatataaaattaatatatagatccttaaaagatcctgatgatcatcatgttcctgtagaatttctaagattaaaaccttgttatccttatattgatactggtggcagtttatctttggcttcaacagatgccaccaacaaggcccactgggattatttacatcttcactggacagatcctttaaatttaatagtatgtgatgcagaaataagtggtgtgaagcactggctaaaaattcttcacaggtggtatgagcacatgacttcctgcaagcactgtttaaaatcagaacatgataaatatttaataataaaatatcatgctcaagatgatttaatagatcttcctcatggtgtcaggctactaaaatgtaacatctgcctgggctccaaactaagtggcagtgagagctacctgctcattggtcttggtctttcaaataaacttcctgtctacagtgaagttcttcattcaaaacttcttttggcagaatgtcatcagtttcatcatccaaaatatttggatgtttctggaataaatacaaatataaaatccttaataccaatgttggattatccaataacttacaacaagatcaccactttgctagaaagtgtgcgggagctttcttcaaataaaaacaagaacaccatgtggattggaagaaatcctgtctaccataataaatggctaaagaggaaatatttcaacattttaaaatggctaaaatactgtatagaacttcctgccttcaggatggattataattcatttgagagaatagaaatgctttatccaaatttaagagatttggtagattctgtttctacttcagagctgaagaaagtaataaaagtaacaggcatcctcttcaggagcaacaccatgtgaattaatatgccaatgctaacatgtcatccccactactttttttgttcaatcactctcagtctagacatgtgagaagatcccaaacccaactgcacccctcccactcgaaatcagttgtagcctcagcagctccatctgccatgatctctgaccagcagcaaatgtattattattttaatttgtctatagttaacaaaaaattgatatctcacaggttgtaaacatagttcttttataattattgttagttaaactattgtgtttgacttcctttgggtatttttttcccgtgggtcggcatggcatctccacctcctcgcggtccgacctgggcatccgaaggaggacgcacgtccactcggatggctaagggagagcctgcagtagcataaccccttggggcctctaaacgggtcttgaggggttttttgctgaaaggaggaactatatacgcgtcgacgggcccgcgctcactggccgtcgttttacaacgtcgtgactgggaaaaccctggcgttacccaacttaatcgccttgcagcacatccccctttcgccagctggcgtaatagcgaagaggcccgcaccgatcgcccttcccaacagttgcgcagcctgaatggcgaatgggacgcgccctgtagcggcgcattaagcgcggcgggtgtggtggttacgcgcagcgtgaccgctacacttgccagcgccctagcgcccgctcctttcgctttcttcccttcctttctcgccacgttcgccggctttccccgtcaagctctaaatcgggggctccctttagggttccgatttagtgctttacggcacctcgaccccaaaaaacttgattagggtgatggttcacgtagtgggccatcgccctgatagacggtttttcgccctttgacgttggagtccacgttctttaatagtggactcttgttccaaactggaacaacactcaaccctatctcggtctattcttttgatttataagggattttgccgatttcggcctattggttaaaaaatgagctgatttaacaaaaatttaacgcgaattttaacaaaatattaacgcttacaatttaggtggcacttttcggggaaatgtgcgcggaacccctatttgtttatttttctaaatacattcaaatatgtatccgctcatgagacaataaccctgataaatgcttcaataatattgaaaaaggaagagtatgagtattcaacatttccgtgtcgcccttattcccttttttgcggcattttgccttcctgtttttgctcacccagaaacgctggtgaaagtaaaagatgctgaagatcagttgggtgcacgagtgggttacatcgaactggatctcaacagcggtaagatccttgagagttttcgccccgaagaacgttttccaatgatgagcacttttaaagttctgctatgtggcgcggtattatcccgtattgacgccgggcaagagcaactcggtcgccgcatacactattctcagaatgacttggttgagtactcaccagtcacagaaaagcatcttacggatggcatgacagtaagagaattatgcagtgctgccataaccatgagtgataacactgcggccaacttacttctgacaacgatcggaggaccgaaggagctaaccgcttttttgcacaacatgggggatcatgtaactcgccttgatcgttgggaaccggagctgaatgaagccataccaaacgacgagcgtgacaccacgatgcctgtagcaatggcaacaacgttgcgcaaactattaactggcgaactacttactctagcttcccggcaacaattaatagactggatggaggcggataaagttgcaggaccacttctgcgctcggcccttccggctggctggtttattgctgataaatctggagccggtgagcgtgggtctcgcggtatcattgcagcactggggccagatggtaagccctcccgtatcgtagttatctacacgacggggagtcaggcaactatggatgaacgaaatagacagatcgctgagataggtgcctcactgattaagcattggtaactgtcagaccaagtttactcatatatactttagattgatttaaaacttcatttttaatttaaaaggatctaggtgaagatcctttttgataatctcatgaccaaaatcccttaacgtgagttttcgttccactgagcgtcagaccccgtagaaaagatcaaaggatcttcttgagatcctttttttctgcgcgtaatctgctgcttgcaaacaaaaaaaccaccgctaccagcggtggtttgtttgccggatcaagagctaccaactctttttccgaaggtaactggcttcagcagagcgcagataccaaatactgtccttctagtgtagccgtagttaggccaccacttcaagaactctgtagcaccgcctacatacctcgctctgctaatcctgttaccagtggctgctgccagtggcgataagtcgtgtcttaccgggttggactcaagacgatagttaccggataaggcgcagcggtcgggctgaacggggggttcgtgcacacagcccagcttggagcgaacgacctacaccgaactgagatacctacagcgtgagctatgagaaagcgccacgcttcccgaagggagaaaggcggacaggtatccggtaagcggcagggtcggaacaggagagcgcacgagggagcttccagggggaaacgcctggtatctttatagtcctgtcgggtttcgccacctctgacttgagcgtcgatttttgtgatgctcgtcaggggggcggagcctatggaaaaacgccagcaacgcggcctttttacggttcctggccttttgctggccttttgctcacatgttctttcctgcgttatcccctgattctgtggataaccgtattaccgcctttgagtgagctgataccgctcgccgcagccgaacgaccgagcgcagcgagtcagtgagcgaggaagcggaagagcgcccaatacgcaaaccgcctctccccgcgcgttggccgattcattaatgcagctggcacgacaggtttcccgactggaaagcgggcagtgagcgcaacgcaattaatgtgagttagctcactcattaggcaccccaggctttacactttatgcttccggctcgtatgttgtgtggaattgtgagcggataacaatttcacacaggaaacagctatgaccatgattacgccaagcgcgcccgggtaatacgactcactataggg

SEQ ID NO: 27 - DNA, 18753 bp, synthetic construct
  source 1..18753: mol_type = other DNA
acgcgaaaaaatgcataacaaaactatcaacctgaaaaaagttaggacaagtgaagattgctagtcccaaagaccagaatcatgggctgtaatgtgatgatggagcttgattatggtggacgagctgcatggctggcattccacataaccaactttgataggtcagatttggaaactatcctaagaggtgctagggtgtgcaatacatggcaagatcagagactctccgtgtaccttgtgggaagggattgcaatttgttaagaccatttgtgcaagctgccaaatttatccataatactaggagaggccaaacattaacacattggttcacaaaaaatatcgtgtttagttctacagggcaagagacagagcctcccattgaccccacatgtgagctgttggtagagctgatcagtggttaagatgacagcacattatgtagttaattaaaacaaagggtaggacaagtcctaatgtccacagctatgaacaagttcactcagaccatctctaaacctgccactatcttgaatatttcagacagtgaagagtcgggcgatgaggcaggggtgggcaaggtgtcccgtaccacacagagctcagagaggtggcttgatttgctcattgaaaagttccagccgagcctacaaaacatcactagatacatcaactggaacttcatcaggatctgcaatgataggcttaaaaaagaaaaaatggggtacattgaggccaagcaatatgtggaagacatggcttggatggtgatagcatctgaggcagacagcattgagtggaagtgcataaggaggcaggagaaagtgactggggtgaaatacccaaagttcttctttgtacaacacaaagaggactggattgagtgcacaggatgcattccgtacccaggccatgacttgatctatgatgaggatgatgatgactgagctgactcagatcactccaaccagcagagagatccatagttatagaaaaacattaggataaatacacatcctaggccgccaccatgttcgtgtttctggtgctgctgcctctggtgagctcccagtgcgtgaacctgaccacaaggacccagctgccccctgcctataccaattccttcacacggggcgtgtactatcccgacaaggtgtttagatctagcgtgctgcactccacacaggatctgtttctgcctttcttttctaacgtgacctggttccacgtgatcagcggcaccaatggcacaaagcggttcgacaatccagtgctgccctttaacgatggcgtgtacttcgcctccatcgagaagtctaacatcatcagaggctggatctttggcaccacactggacagcaagacacagtccctgctgatcgtgaacaatgccaccaacgtggtcatcaaggtgtgcgagttccagttttgtaatgatccattcctggaccacaagaacaataagtcttggatggagagcgagtttcgcgtgtattcctctgccaacaattgcacatttgagtacgtgtcccagcccttcctgatggacctggagggcaagcagggcaatttcaagaacctgagggagttcgtgtttaagaatatcgatggctacttcaagatctactccaagcacaccccaatcatcgtgcgcgagccagaagacctgccacagggcttctctgccctggagccactggtggatctgcccatcggcatcaacatcacccggtttcagacactgctggccctgcacagaagctacctgacaccaggcgacagctcctctggatggaccgcaggagctgccgcctactatgtgggctatctgcagcccaggaccttcctgctgaagtacaacgagaatggcaccatcacagacgccgtggattgcgccctggatcccctgtctgagaccaagtgtacactgaagagctttaccgtggagaagggcatctatcagacaagcaatttcagggtgcagcctaccgagtccatcgtgcgctttcccaatatcacaaacctgtgcccttttgacgaggtgttcaacgcaacccgcttcgccagcgtgtacgcctggaataggaagcgcatctccaactgcgtggccgactattctgtgctgtacaaccttgctccattcttcacctttaagtgctatggcgtgagccccacaaagctgaatgacctgtgctttaccaacgtgtacgccgattccttcgtgatcaggggcgacgaggtgcgccagatcgcccctggccagacaggcaacatcgccgactacaattataagctgcctgacgatttcaccggctgcgtgatcgcctggaactctaacaagctggatagcaaagtgagcggcaactacaattatctgtaccggctgtttagaaagtctaatctgaagccattcgagagggacatctccacagagatctaccaggccggcaacaagccctgcaatggcgtggccggctttaactgttatttccctctgaggagctacagcttcaggccaacatacggcgtgggacatcagccctaccgcgtggtggtgctgtcttttgagctgctgcacgcacctgcaacagtgtgcggaccaaagaagagcaccaatctggtgaagaacaagtgcgtgaacttcaacttcaacggactgaagggcacaggcgtgctgaccgagtccaacaagaagttcctgccttttcagcagttcggcagggacatcgcagataccacagacgccgtgcgcgaccctcagaccctggagatcctggatatcacaccatgctccttcggcggcgtgtctgtgatcacaccaggcaccaatacaagcaaccaggtggccgtgctgtatcagggcgtgaattgtaccgaggtgcccgtggcaatccacgcagatcagctgacccctacatggcgggtgtactctaccggcagcaacgtgttccagacaagagccggatgcctgatcggagccgagtacgtgaacaatagctatgagtgcgacatccctatcggcgccggcatctgtgcctcctaccagacccagacaaagtcccacgggtctgcctcctctgtggccagccagtccatcatcgcctataccatgagcctgggcgccgagaattccgtggcctactccaacaattctatcgccatccctaccaacttcacaatctccgtgaccacagagatcctgccagtgagcatgaccaagacatccgtggactgcacaatgtatatctgtggcgattccaccgagtgctctaacctgctgctgcagtacggctctttttgtacccagctgaagagagccctgacaggcatcgccgtggagcaggacaagaacacacaggaggtgttcgcccaggtgaagcagatctacaagaccccacccatcaagtactttggcggcttcaacttcagccagatcctgcccgatcctagcaagccatccaagcggtctcctatcgaggacctgctgttcaacaaggtgaccctggccgatgccggcttcatcaagcagtatggcgattgcctgggcgacatcgccgccagagacctgatctgtgcccagaagtttaagggcctgaccgtgctgcctccactgctgacagatgagatgatcgcccagtacacatctgccctgctggccggcaccatcacaagcggatggaccttcggcgcaggacccgccctgcagatcccctttcccatgcagatggcctatcggttcaacggcatcggcgtgacccagaatgtgctgtacgagaaccagaagctgatcgccaatcagtttaactccgccatcggcaagatccaggactctctgagctccacacccagcgccctgggcaagctgcaggatgtggtgaatcacaacgcccaggccctgaataccctggtgaagcagctgtctagcaagttcggcgccatctcctctgtgctgaatgatatcttcagcaggctggaccctccagaggcagaggtgcagatcgaccggctgatcacaggcagactgcagtccctgcagacctacgtgacacagcagctgatcagggcagcagagatcagggcctctgccaatctggccgccaccaagatgagcgagtgcgtgctgggccagtccaagagagtggacttttgtggcaagggctatcacctgatgagcttcccacagtccgcccctcacggagtggtgtttctgcacgtgacctacgtgccagcccaggagaagaacttcaccacagcaccagcaatctgccacgatggcaaggcacactttcctagggagggcgtgttcgtgagcaacggcacccactggtttgtgacacagcgcaatttctacgagccacagatcatcaccacagacaatacattcgtgtccggcaactgtgacgtggtcatcggcatcgtgaacaataccgtgtatgatcctctgcagccagagctggactcttttaaggaggagctggataagtacttcaagaatcacaccagccccgacgtggatctgggcgacatctctggcatcaatgccagcgtggtgaacatccagaaggagatcgacaggctgaacgaggtggccaagaatctgaacgagtccctgatcgatctgcaggagctgggcaagtatgagcagtacatcaagtggccctggtatatctggctgggcttcatcgccggcctgatcgccatcgtgatggtgaccatcatgctgtgctgtatgacaagctgctgttcctgcctgaagggctgctgttcttgtggcagctgctgtaagtttgatgaggacgatagcgagcctgtgctgaagggcgtgaagctgcactacacctgatagccacctatagcaagtgatgtagtatttagtctatgattagttatagaaaaacattaggataaatacacatcctaggccgggccaaaatgtctctagacagattgaagctcaatgatgtctcaaacaaggatagcctgctgtccaactgcaaatacagtgttaccagatccacaggcgatgtaaccagtgtgtctggtcatgctatgcagaaagcccttgcaaggacactcggcatgttcttacttactgccttcaaccgttgcgaagaagtggcagaaatagggctccaatatgccatgtccttgctaggcagagatgatagcatcaagatattaagagaagccggctacaatgtaaaatgtgtggacacacagctcaaggactttacaatcaaattacaaggaaaggaatacaaaatacaagtcctagatatagtgggaatagatgcagccaatttagctgatctagagatacaagccagaggagtggtagcaaaagaactcaaaacaggagccaggctacctgacaatcggaggcatgatgcaccagattgtggtgtgatagttctctgtattgcagcattagttgtttccaaattagctgcaggggacaggggaggacttgatgctgtggaaagaagggctttaaatgtgctgaaagccgagaaagccaggtaccccaacatggaggtcaagcagatagctgaaagtttttatgatctgtttgaaaggaagccttattacattgatgtcttcatcacttttggcctggcccagtctagtgtcaagggaggcagcaaagttgaggggctgttttcaggtctcttcatgaatgcatacggggcaggacaagttatgctgaggtggggtttactggcaaaatctgtcaagaacatcatgctaggccatgctagtgtacaagctgagatggaacaggtggttgaggtttacgaatatgctcagaagcaaggaggggaggcaggattctatcacatcagaaataatccaaaagcttcacttctctctttgaccaattgtcctaatttcaccagtgttgtgcttggcaatgctgcaggtttaggcatcatagggtcatataagggtgctcctaggaatagagaactctttgatgctgccaaagattatgcagaaagattaaaggacaacaatgtaattaactacagtgcattaaacttgactgcagaagaaagagagctgatcagccagcagctgaacattgttgatgacactcctgatgatgatatttaattaaaactggaaaatgtaggataaatatggagaaattcgcccccgaatttgttggcgaggatgctaacaagaaggcagaggagtttctcaaacatagatccttcccttcggaaaaaccactagctggtataccgaacactgccactcatgtcaccaaatataacatgccccctatattgcgtagctcattcaaactcccttccccgagagttgctgcaaatcttactgaaccctctgctccccctaccactccaccacccacacctccccagaacaaggaagagcagcccaaagagtctgatgttgacattgagactatgcatgtctgtaaggttcctgacaatccggaacacagcaagaagccatgctgctcagatgataccgatactaagaaaactaggaagccgatggtcacctttgtggaacccgaggagaaatttgtcggattgggagctagcttgtacagggagaccatgcagacctttgctgctgatggttatgatgaagaaagcaacctatcgtttgaggagactaaccaagagccgggttcttcatctgtagaacaaagactagatagaatagaggagaaattgtcctacataataggccttttaaacaccataatggtagcgactgctggacctaccactgctagagatgagattagagatgcccttataggcactagagaagaacttattgagatgatcaagtctgacatcttgactgtcaatgacagaatagtggccatggagaagctcagagatgaggaatgctccagagctgacactgatgatggatcagcctgttatttaacagacagagcaaggatactagataagatagtgtccagcaatgctgaagaggctaaggaagatttggatgttgatgacatcatgggcattaatttttagttaattaaaataacaacaggacaaataatggaggcctacttggtagagatgtaccatggtgtcccatatacagctgcagtacagctaaacttggttgaaaaacattcagccaacatatcactaactgtgtggataccgatgtttcaaacatctctaccaaagaactccgttatggacctgctacatgatgttacagtcatttgtacacagatatcaacagtgcatggtcccatgatcaaggtagatctgagctcttccaatgcaggtttagctaccatgccaaggcaattcttgataaatgctatcatagctttggatgactggggcaacatggattacgaagtgcctgttgcttttgataaaaagagcttctgtgtgacaattcttaagcctaaaaacatgctttacactgtacccagcattactcccactaatcgacctactcatgagctgatagctgtctgctctttccataacagggtaacattaaagtcattcaatatacctgtcttcatcagagcactgtctatcagacagcaggaccttgatagtgtggagcaggctataagctccgatgtggaccatgctataacaacagctagggtggctccctatgcagggcttacacttgtgatcaacatcacatccaccaaaggagcattcaaactgctaaaggcaggtagtcagattcttgcagaactgggtccctatctgacgcaggtgagcctacatgatgtgattatgaactggaaacatacaggcacttcctacatactcaagagctcctcaacaagtggatgaaaaagagaaagtcaccattgatcagctcaatccacaactacaaccccacgatttcacacagcacaacaaccaccgccaccaacatccacatgacaaccacacatacacacccacatacatatatacacatatcttagttaaataaaatcaggataaataatggatcctaacatgacctcacaccagatcaccctcgagatcaacatgaccagcagccgtattggcacatacactacaccagccccaacagctcttctccttgcatgtgccgtcatcaacacagtgtgtgcgctgataatggcctgcagcagtagaagcactgccacatcaggcattgtcagcagccaatgcacagttcatcccaatcaccctccaccaagttatggcgtcaatgtaactggtctgccgggtaacctatactcaaggaacactacataacattataaataacagaaattatccttcaataaaccccaggccagacagctttaccctgctagacgattcaatcagcccttgcagtatgtcgtctagttaacaaaaaaccggtaggataagtactatcctattggaaccaaacgagacctgtagagcagctcacacaagagaaccacaagctgacttcacctagtatgggaaggaacttagaagtgagtggcagcattaccaatttgaactttgagagaactcagcatcctgacacatttaggactgttgtaaaagtgaaccaaatgtgtaagcttattgcaggtgtgctcacaagtgctgctgtggcagtttgtgtgggggtcataatgtattctgttttcacatcaaaccacaaggccaactccacgcagaatgccacgacccggaacagcacatccacccctccccaaccaaccgccggtctgcccaccacagagcaagggaccatccccagattcaccaaaccccccaccaaaaccgccacccaccatgagatcacagagcccgtcaaaatggcaacaccttcagaggatccctaccaatgctccagcaatggttatttggaccgacctgatttacctgaaaatttcaaactcgtattggatgttatatgcaagcctccaggtcctgaacatcacaacaccagctgttatgagaaacgtgaaatcaacccaggaagtgtttgccctgatcttgtaacaatgaaggcaaacatgggcttaaacaatggtggtggggaggatgctgcaccttatatagaggttaccaccctttctacgtactccaacaaaagggcaatgtgtgtccacaatgggtgtgatcaaggcttctgtttcttcctttctggtttaagcactgatcaggagagagctgtgctagagcttggaggtcaacaggctatcatggagttgcattatgattcctactggaaacactattggagtaactctaattgtgttgttcccagaacaaactgcaacctgacagaccaaactgagattttgtttcctaggtttaacaacaagaatcagtctcagtgtaccacctgtgcagattcagctggcctagataacaaattttatctcacatgtgatgggcttttaagaaccctccctctagttggactacccagcctaagtcctcaggcttacaaagctgtacccacacaaactacaggcaccaccacggcaccaacatcagagacgaggcacccaacccctgcacccaggaggtccaaacctctcagtcggaagaagagagctttatgtggtgtagactcaagcagagaacccaaaccaacaatgccttactggtgtcctatgctccaattatttccaaggaggtctaattcttaagtgacctattcctgaattaacttcagaataagtaccaaccttatcagtagttaatgaaaactaagctttgatataataggacaaatatgattcctggcaggatctttctagtccttctggtgatcttcaacaccaagccaattcacccaaatacattaacagaaaaattctatgagtccacatgtagtgttgagactgcaggttataagagtgcccttagaacaggttggcatatgacagttatgtcaattaagttgtctcaaataaatattgagtcatgcaagagcagcaactcgttattggctcatgagcttgcaatctatagtagtgcagtggatgaattgagaacgttatcatccaatgccttgaagtccaaaaggaagaagaggttcctcggtttgattcttggtctcggagctgcagtcactgccggggtggctttagccaagacagtgcaacttgaaagtgagattgcattgattagagatgcagtgagaaatacaaatgaggctgttgttagcctaaccaacggcatgtcagtgttggctaaagtggtggatgatttgaaaaacttcatatctaaagaattactcccaaaaataaaccgagtctcttgtgatgtgcacgacatcactgccgtcattagattccaacagctcaacaaaagacttttggaagtatctcgtgaattttcatctaatgcaggattaacacacactgtttcatcttttatgttaacagaccgggaactcacctccattgtaggcggcatggctgtttcagcaggccaaaaagagataatgctatctagcaaagctataatgagaagaaatgggttagcaatattaagttcagtcaacgctgacacactggtttatgtaatacaactcccattatttggtgttatggacacagattgttgggtaataagaagttctatagactgtcataacatagcagacaagtatgcttgtttggctagagctgataatggctggtattgtcacaatgctggctcattatcatacttcccgtcgccaacggattgtgagatccacaatgggtatgctttctgtgacactctaaaaagtctaactgtacctgtaacatcacgagaatgcaactcaaacatgtataccactaactacgattgtaagatttccacaagtaaaacttatgtgagtacagcggtactgactacaatgggttgcttggtatcttgttatggtcataacagttgcacagtcatcaataatgacaaaggtataataaggactctgccagatggttgccactacatctccaacaaaggtgtggacagggttcaagtaggtaacactgtttactatcttagcaaagaagttggcaagtcaattgttgtcagaggggaaccattggtcttgaaatatgaccctttgagtttccctgacgataaatttgatgttgctataagagatgtggagcatagcatcaatcagacacgcacattcttgaaggcctctgatcagttattggacttaagtgaaaacagagagaataaaaatttaaacaagtcatatatactaacaactctgctcttcgttgtaatgcttattataataatggctgtcatagggttcattctgtataaggtattgaaaatgatcagagacaacaagttgaaatccaaaagtacacctggcctcacagttttatcatgacaattgtaccaaaccataattgagttagttaattaaaaacttaggataagtgacaatccagacccaacacctctttcaactctcaaggataaggtaggatgagtgtgagaccttgcaaatttgaggttcaagggttttgttccagagggaggaattgcaagtatagtcataaatattgggaatggcctttgaaaactcttatgctcaggcagaactacatgcttaataggatttataggttcctcgacaccaacacagatgcaatgtcagatgtcagcggatttgatgcaccacaaaggactgctgagtatgccttgggaaccataggtgtgctgaaaagttacctggaaaaaactaacaacatcactaaatcaatagcttgtggcagtttgatcactgtattgcagaacttggatgttggtctagtaatacaagcaagagatagcaacactgaggacaccaattacttgagaagttgcaacactatactgtcttatatagacaagatacacaagaagagacaaattattcacattctcaaaagactgccagtaggagtactatgcaatctgatccaatctgtcatctccatcgaggagaagataaattcttctatgaaaacagaatgataaggctgcctaaatactatccagccatactgcataagatgtatattattagagtaaatagaaacctcacttacgatgggtctggaccatccacaataatagatgcaggaaagtctgtggtgtggaatcgtgttgatgtgatagcttgtgtgaaagaggccttgtgctgcatagaattcagctggaataaccaagtgatcatagactttgattatagccaggccagatgatgtggactgtattcctttttttgtcagtaatcagttattaacccaaaattgttaattatgtagactttaagttaactaacttcatgttaattcaatagttatataaaaaaatattcgaattaggatcaatatggatcctattgatgaacaagaagttaatgtgtacttgccggatagctacttaaagggtgttatatcttttagtgaaactaatgctcttggcagctgtatcattggtagacctttcttgaaggatgactttactgccactacttcaatccgtaaccccctaattgaacataaaagaataagggacactaaattagtaaaaaatattgtttcaaaccctcaatataggttagtggagcctctccaaatgcagcatgagctcttgagtgtactatcgcccaatttcatattgcacactgccaacttaaggaaaattatacaaagaagtgttgacataacagataaaaagttgaaccccattttgcacattttgaatcttaattctcctaaccaagagggtaaggtgtcggaacggctaactaggctaattaagaaacatctctctcacatacctaattgggtaagcagctggtacaatatatgggtcaatcttaacaacttactgcaggagtaccgttcaaaggaagttatagaccataactgtgttctgactaggcaattgtctggaagtttcatacatgtggtcatgagtcaatatggagttgtgataattagcaaaaaaagtaaaagatatacaatgtgtacttataaccaattcctaacctggaaggaccttgccttgagcagatttaatgccaattatgtggtctggctaagtaatgtgttaaacacactcaacgaggggttgggattaaggtgtagattaaaaggtcatctgctcagtaagttgtacatttccactgacatctttttatcttcaacatctaatgaattttataatgtggtcaaggaatttgagggcttcatcatgtcactgatattgaaacaaactgaggaagccttatttagcacaaggttttataataacatgttgaacaacttaattgatgccattgatagggctcgactagagtatctggcccgctgtgccaattcagctgccaggattaatttacctagtacagatgttatgatagcatcattgggtgatatcttatctttgataaacgttttaggtgaatccaaccttaacaacttaagtgagttatattttatcttcaggatatttggtcaccctatggttgatgagaggaaggccatggatgcagtcagagataactgttgtgaaacaaagtttctgacggctaagaaccttgcatcgttaagaggagcatatgtttatagaattatcaaaggattcgtagcaaattataacaggtggccttacataaaaactagagtttgccttacaccaacatggattaactatcttgacaccaattcatgtccctcattattagagatgacagaagatgattttattgtgttagctggagtgcactttataagagaattccacatcccaaagctaactgatctggagattatattaaatgacaaggccatatctcctccaaaatcactcatttggtcatgctttccaaaaaactacatacctcaggttatacaagatgagtatgcccggaggtattgtagagctaaagcacctttgaagacaagacgtgtcttggagttctacttacaggacaaggatttcaagttggatcagctccatagagtagtagtgaaccaggactaccttaatgataaagaacatataatttctttaacaggaaaagaaagagagttgggtgttggtaggatgtttgccatgcaacctgggaagcagaggcaagtccaaattttagcagagaagctgttggctgataacatcctgcaattctttccggagacactgactagatacggtgatttggagctgcaaaagatactagagttaaaagctggactttcaaataaaaatgacagatctaaagactcctacaataattatataagtaggtgctcattaattactgatttaagtaaatttaaccaagcttttaggtacgagtcatcctgtgtgtgtagtgatcttttagatgagctacatgggactcaaagcttattctcttggctgcatttaacagtaccactgactactataatgtgtacatataggcatgcgccgccggacactggaaacaactataatgtagatgatattgctgagcagagtggactctaccgctaccacatgggcgggattgagggctggtgccagaagctctggacaacagaggccattgctttgctagatactgtagctgtgaagggccgtttccagctaacttcattaataaatggcgacaaccaaagtattgatatttcaaaaccaacaaggctggggaccaggactcaaagtgaagcagattatgatttggcaataaattctttaagattaatatcagcagcttataaaggcattggacataaattaaaagaaggtgagacctacttgtcacgtgacatgcagttcatgagtaaaacaatacaacatgaaggggtctactacccggcctccatcaagaaaatattaagagttggtccctggatcaacacaatattagatgatataaaaacttcaacagaaagtattggttctctaactcaagaactagaatataaaggtgaaagtttaatgagcagcctgctgctgaggaacttctggctctacagattatattcagtggatttaaaagatcattctttgtgtggaaagcagctctacagatccttaataaaagtgttaaaacatttgaagaggtgcttcaacctggagaaccttggggaatgtttggaattatttttaaatgtgcccatgcagtttggaggtgctgacccaaatgtcatctacaggagcttctacagaagaactccagattttctaacagaaagtataactcatctcatcctcattttaaaacattttagaagagatttggaattcaacaaagataatgtctccaaagctgttctttctttgctagagttcaccaagaatgattctgcagaatttgtaactttgatgagagatcctcaagcaattggtagtgagaggcaggccaagatcacttcagacatcaacagaacagctgtaacttcagtgttatcaaatgctccaaatgaaatatttagaacttcagctcttcattacagcagcacagaaaatgaattaaatggaatagcaagtggagtttctcctgtttatcctcatggtcttcgagttttatatgaaagtttacctttttataaagcagagaagattgtcaacatggtttctgggaccaagtccatcaccaacatactggagaagacatcagccatctcctacacagatataattcgagccaccaacatgatggtggagaacctcactttgctaacaagaataatgaaaccaggtgctgacacatctttggatcctgacacaatagtaataacaatattatcaaaaataataagagataaatcctgggatgttggtgatataattggtgtcacttccccatctcctgtctcctgcttcaaggtggtctacacatcaactctacaaaataattcagtagtaatagaaagatacacaacagacacctacacaagaggtaagagaggccccaccaagccctgggtgggcagcagcacacaggagaagaagtccatgcctgtctacaacagacaagttttaacaagaggacaaagagatcaaatagaaaatatagcaaagctggagtgggtgttttcttcagtagcaaatattgattctttgctaaatgagctcagcaccatgactttgggtctttctctaaggaaatgtagacaactttttccaacatatttaagtttaaacttcctgcacaggctttctgtcagcagcaggcccagagaatatccttcttctcttcctgcctacaggacaacaaattttcattttgatactggaccaataaataaagtgttaacagaaagatttggagatgaagatataaatttggtatttcaaaatgcaatatcatatggtctttccaccatgtctttggtggagcagtttactggtgtctgtccaaataaagttttgctggtgcccaagctacaagaaatacaactaatgaaagttccaatatttcaaggtggcttcaacctacaaagtataattccaataataaggcagcagcacatgttcctgcccaaccacatcactccagcccagtatattgaattatttctttcttcaaaacaatttcattcaagaataaatttaaaacacaacaacagatttaaacttgttttacaaaaagattattttaatggggagaacatgatagaaactttgtccacctgtttggcaggccactggatcatcattttgatgctaatgaaggagagtcaggggatatttgacaaggagtggtatgatggttttgtaacagaccacatgttcctggacctgcagctcttcctctcctccttcaagacatttctaactgtcttcaactttgcttatttaaaagttggttcaaatatagaagaaataacaggaaatcaagccaacctgctggagctgctggacctgggctactggaagaacatgtataaagtattttcagagaccaaggtgcggctggctttgctaaaacaagatttatcatttaattctgtgaagaacagcagcagcttccggcactggtttataaattctctacaagaagtacaatgtacttctgtgccttgggtggtaaatgtaacaagaaatccaactcatttaaaaggtgttctacagtacatgaagatgatagaaagtggcatgattcaaggttattcagcaaatatttcttcagttttaagtatcccatataattatccagacatggcgcacatgatgacaaaaataataagaaatcgaggccacatgtcctatgattatccaaagatgaagaaaagtttaactttctccatgacagacatgagtgacagctacatgctcaacctcttccccaaagtagaatgttcttacatgagtggttatttggataaactagatgatactctacaacttctaaagaaacctcctgttggaagaaaagttccttctgtggctttgccctggcaccactgcaacagatacaactttgtcttcagcagcacaggctgcaaagtttctgtcattgacatgcttccaaaacatttccgaagaagtaatttaaaagtaatatgttttattggagaaggggcgggcaacctcatgctaagagctgttttggaagttggtggaaatataaaattaatatatagatccttaaaagatcctgatgatcatcatgttcctgtagaatttctaagattaaaaccttgttatccttatattgatactggtggcagtttatctttggcttcaacagatgccaccaacaaggcccactgggattatttacatcttcactggacagatcctttaaatttaatagtatgtgatgcagaaataagtggtgtgaagcactggctaaaaattcttcacaggtggtatgagcacatgacttcctgcaagcactgtttaaaatcagaacatgataaatatttaataataaaatatcatgctcaagatgatttaatagatcttcctcatggtgtcaggctactaaaatgtaacatctgcctgggctccaaactaagtggcagtgagagctacctgctcattggtcttggtctttcaaataaacttcctgtctacagtgaagttcttcattcaaaacttcttttggcagaatgtcatcagtttcatcatccaaaatatttggatgtttctggaataaatacaaatataaaatccttaataccaatgttggattatccaataacttacaacaagatcaccactttgctagaaagtgtgcgggagctttcttcaaataaaaacaagaacaccatgtggattggaagaaatcctgtctaccataataaatggctaaagaggaaatatttcaacattttaaaatggctaaaatactgtatagaacttcctgccttcaggatggattataattcatttgagagaatagaaatgctttatccaaatttaagagatttggtagattctgtttctacttcagagctgaagaaagtaataaaagtaacaggcatcctcttcaggagcaacaccatgtgaattaatatgccaatgctaacatgtcatccccactactttttttgttcaatcactctcagtctagacatgtgagaagatcccaaacccaactgcacccctcccactcgaaatcagttgtagcctcagcagctccatctgccatgatctctgaccagcagcaaatgtattattattttaatttgtctatagttaacaaaaaattgatatctcacaggttgtaaacatagttcttttataattattgttagttaaactattgtgtttgacttcctttgggtatttttttcccgt

SEQ ID NO: 28 - DNA, 21745 bp, synthetic construct
  source 1..21745: mol_type = other DNA
acgcgaaaaaatgcataacaaaactatcaacctgaaaaaagttaggacaagtgaagattgctagtcccaaagaccagaatcatgggctgtaatgtgatgatggagcttgattatggtggacgagctgcatggctggcattccacataaccaactttgataggtcagatttggaaactatcctaagaggtgctagggtgtgcaatacatggcaagatcagagactctccgtgtaccttgtgggaagggattgcaatttgttaagaccatttgtgcaagctgccaaatttatccataatactaggagaggccaaacattaacacattggttcacaaaaaatatcgtgtttagttctacagggcaagagacagagcctcccattgaccccacatgtgagctgttggtagagctgatcagtggttaagatgacagcacattatgtagttaattaaaacaaagggtaggacaagtcctaatgtccacagctatgaacaagttcactcagaccatctctaaacctgccactatcttgaatatttcagacagtgaagagtcgggcgatgaggcaggggtgggcaaggtgtcccgtaccacacagagctcagagaggtggcttgatttgctcattgaaaagttccagccgagcctacaaaacatcactagatacatcaactggaacttcatcaggatctgcaatgataggcttaaaaaagaaaaaatggggtacattgaggccaagcaatatgtggaagacatggcttggatggtgatagcatctgaggcagacagcattgagtggaagtgcataaggaggcaggagaaagtgactggggtgaaatacccaaagttcttctttgtacaacacaaagaggactggattgagtgcacaggatgcattccgtacccaggccatgacttgatctatgatgaggatgatgatgactgagctgactcagatcactccaaccagcagagagatccatagttatagaaaaacattaggataaatacacatcctaggccgccaccatgttcgtgtttctggtgctgctgcctctggtgagctcccagtgcgtgaacctgaccacaaggacccagctgccccctgcctataccaattccttcacacggggcgtgtactatcccgacaaggtgtttagatctagcgtgctgcactccacacaggatctgtttctgcctttcttttctaacgtgacctggttccacgtgatcagcggcaccaatggcacaaagcggttcgacaatccagtgctgccctttaacgatggcgtgtacttcgcctccatcgagaagtctaacatcatcagaggctggatctttggcaccacactggacagcaagacacagtccctgctgatcgtgaacaatgccaccaacgtggtcatcaaggtgtgcgagttccagttttgtaatgatccattcctggaccacaagaacaataagtcttggatggagagcgagtttcgcgtgtattcctctgccaacaattgcacatttgagtacgtgtcccagcccttcctgatggacctggagggcaagcagggcaatttcaagaacctgagggagttcgtgtttaagaatatcgatggctacttcaagatctactccaagcacaccccaatcatcgtgcgcgagccagaagacctgccacagggcttctctgccctggagccactggtggatctgcccatcggcatcaacatcacccggtttcagacactgctggccctgcacagaagctacctgacaccaggcgacagctcctctggatggaccgcaggagctgccgcctactatgtgggctatctgcagcccaggaccttcctgctgaagtacaacgagaatggcaccatcacagacgccgtggattgcgccctggatcccctgtctgagaccaagtgtacactgaagagctttaccgtggagaagggcatctatcagacaagcaatttcagggtgcagcctaccgagtccatcgtgcgctttcccaatatcacaaacctgtgcccttttgacgaggtgttcaacgcaacccgcttcgccagcgtgtacgcctggaataggaagcgcatctccaactgcgtggccgactattctgtgctgtacaaccttgctccattcttcacctttaagtgctatggcgtgagccccacaaagctgaatgacctgtgctttaccaacgtgtacgccgattccttcgtgatcaggggcgacgaggtgcgccagatcgcccctggccagacaggcaacatcgccgactacaattataagctgcctgacgatttcaccggctgcgtgatcgcctggaactctaacaagctggatagcaaagtgagcggcaactacaattatctgtaccggctgtttagaaagtctaatctgaagccattcgagagggacatctccacagagatctaccaggccggcaacaagccctgcaatggcgtggccggctttaactgttatttccctctgaggagctacagcttcaggccaacatacggcgtgggacatcagccctaccgcgtggtggtgctgtcttttgagctgctgcacgcacctgcaacagtgtgcggaccaaagaagagcaccaatctggtgaagaacaagtgcgtgaacttcaacttcaacggactgaagggcacaggcgtgctgaccgagtccaacaagaagttcctgccttttcagcagttcggcagggacatcgcagataccacagacgccgtgcgcgaccctcagaccctggagatcctggatatcacaccatgctccttcggcggcgtgtctgtgatcacaccaggcaccaatacaagcaaccaggtggccgtgctgtatcagggcgtgaattgtaccgaggtgcccgtggcaatccacgcagatcagctgacccctacatggcgggtgtactctaccggcagcaacgtgttccagacaagagccggatgcctgatcggagccgagtacgtgaacaatagctatgagtgcgacatccctatcggcgccggcatctgtgcctcctaccagacccagacaaagtcccacgggtctgcctcctctgtggccagccagtccatcatcgcctataccatgagcctgggcgccgagaattccgtggcctactccaacaattctatcgccatccctaccaacttcacaatctccgtgaccacagagatcctgccagtgagcatgaccaagacatccgtggactgcacaatgtatatctgtggcgattccaccgagtgctctaacctgctgctgcagtacggctctttttgtacccagctgaagagagccctgacaggcatcgccgtggagcaggacaagaacacacaggaggtgttcgcccaggtgaagcagatctacaagaccccacccatcaagtactttggcggcttcaacttcagccagatcctgcccgatcctagcaagccatccaagcggtctcctatcgaggacctgctgttcaacaaggtgaccctggccgatgccggcttcatcaagcagtatggcgattgcctgggcgacatcgccgccagagacctgatctgtgcccagaagtttaagggcctgaccgtgctgcctccactgctgacagatgagatgatcgcccagtacacatctgccctgctggccggcaccatcacaagcggatggaccttcggcgcaggacccgccctgcagatcccctttcccatgcagatggcctatcggttcaacggcatcggcgtgacccagaatgtgctgtacgagaaccagaagctgatcgccaatcagtttaactccgccatcggcaagatccaggactctctgagctccacacccagcgccctgggcaagctgcaggatgtggtgaatcacaacgcccaggccctgaataccctggtgaagcagctgtctagcaagttcggcgccatctcctctgtgctgaatgatatcttcagcaggctggaccctccagaggcagaggtgcagatcgaccggctgatcacaggcagactgcagtccctgcagacctacgtgacacagcagctgatcagggcagcagagatcagggcctctgccaatctggccgccaccaagatgagcgagtgcgtgctgggccagtccaagagagtggacttttgtggcaagggctatcacctgatgagcttcccacagtccgcccctcacggagtggtgtttctgcacgtgacctacgtgccagcccaggagaagaacttcaccacagcaccagcaatctgccacgatggcaaggcacactttcctagggagggcgtgttcgtgagcaacggcacccactggtttgtgacacagcgcaatttctacgagccacagatcatcaccacagacaatacattcgtgtccggcaactgtgacgtggtcatcggcatcgtgaacaataccgtgtatgatcctctgcagccagagctggactcttttaaggaggagctggataagtacttcaagaatcacaccagccccgacgtggatctgggcgacatctctggcatcaatgccagcgtggtgaacatccagaaggagatcgacaggctgaacgaggtggccaagaatctgaacgagtccctgatcgatctgcaggagctgggcaagtatgagcagtacatcaagtggccctggtatatctggctgggcttcatcgccggcctgatcgccatcgtgatggtgaccatcatgctgtgctgtatgacaagctgctgttcctgcctgaagggctgctgttcttgtggcagctgctgtaagtttgatgaggacgatagcgagcctgtgctgaagggcgtgaagctgcactacacctgatagccacctatagcaagtgatgtagtatttagtctatgattagttatagaaaaacattaggataaatacacatcctaggccgggccaaaatgtctctagacagattgaagctcaatgatgtctcaaacaaggatagcctgctgtccaactgcaaatacagtgttaccagatccacaggcgatgtaaccagtgtgtctggtcatgctatgcagaaagcccttgcaaggacactcggcatgttcttacttactgccttcaaccgttgcgaagaagtggcagaaatagggctccaatatgccatgtccttgctaggcagagatgatagcatcaagatattaagagaagccggctacaatgtaaaatgtgtggacacacagctcaaggactttacaatcaaattacaaggaaaggaatacaaaatacaagtcctagatatagtgggaatagatgcagccaatttagctgatctagagatacaagccagaggagtggtagcaaaagaactcaaaacaggagccaggctacctgacaatcggaggcatgatgcaccagattgtggtgtgatagttctctgtattgcagcattagttgtttccaaattagctgcaggggacaggggaggacttgatgctgtggaaagaagggctttaaatgtgctgaaagccgagaaagccaggtaccccaacatggaggtcaagcagatagctgaaagtttttatgatctgtttgaaaggaagccttattacattgatgtcttcatcacttttggcctggcccagtctagtgtcaagggaggcagcaaagttgaggggctgttttcaggtctcttcatgaatgcatacggggcaggacaagttatgctgaggtggggtttactggcaaaatctgtcaagaacatcatgctaggccatgctagtgtacaagctgagatggaacaggtggttgaggtttacgaatatgctcagaagcaaggaggggaggcaggattctatcacatcagaaataatccaaaagcttcacttctctctttgaccaattgtcctaatttcaccagtgttgtgcttggcaatgctgcaggtttaggcatcatagggtcatataagggtgctcctaggaatagagaactctttgatgctgccaaagattatgcagaaagattaaaggacaacaatgtaattaactacagtgcattaaacttgactgcagaagaaagagagctgatcagccagcagctgaacattgttgatgacactcctgatgatgatatttaattaaaactggaaaatgtaggataaatatggagaaattcgcccccgaatttgttggcgaggatgctaacaagaaggcagaggagtttctcaaacatagatccttcccttcggaaaaaccactagctggtataccgaacactgccactcatgtcaccaaatataacatgccccctatattgcgtagctcattcaaactcccttccccgagagttgctgcaaatcttactgaaccctctgctccccctaccactccaccacccacacctccccagaacaaggaagagcagcccaaagagtctgatgttgacattgagactatgcatgtctgtaaggttcctgacaatccggaacacagcaagaagccatgctgctcagatgataccgatactaagaaaactaggaagccgatggtcacctttgtggaacccgaggagaaatttgtcggattgggagctagcttgtacagggagaccatgcagacctttgctgctgatggttatgatgaagaaagcaacctatcgtttgaggagactaaccaagagccgggttcttcatctgtagaacaaagactagatagaatagaggagaaattgtcctacataataggccttttaaacaccataatggtagcgactgctggacctaccactgctagagatgagattagagatgcccttataggcactagagaagaacttattgagatgatcaagtctgacatcttgactgtcaatgacagaatagtggccatggagaagctcagagatgaggaatgctccagagctgacactgatgatggatcagcctgttatttaacagacagagcaaggatactagataagatagtgtccagcaatgctgaagaggctaaggaagatttggatgttgatgacatcatgggcattaatttttagttaattaaaataacaacaggacaaataatggaggcctacttggtagagatgtaccatggtgtcccatatacagctgcagtacagctaaacttggttgaaaaacattcagccaacatatcactaactgtgtggataccgatgtttcaaacatctctaccaaagaactccgttatggacctgctacatgatgttacagtcatttgtacacagatatcaacagtgcatggtcccatgatcaaggtagatctgagctcttccaatgcaggtttagctaccatgccaaggcaattcttgataaatgctatcatagctttggatgactggggcaacatggattacgaagtgcctgttgcttttgataaaaagagcttctgtgtgacaattcttaagcctaaaaacatgctttacactgtacccagcattactcccactaatcgacctactcatgagctgatagctgtctgctctttccataacagggtaacattaaagtcattcaatatacctgtcttcatcagagcactgtctatcagacagcaggaccttgatagtgtggagcaggctataagctccgatgtggaccatgctataacaacagctagggtggctccctatgcagggcttacacttgtgatcaacatcacatccaccaaaggagcattcaaactgctaaaggcaggtagtcagattcttgcagaactgggtccctatctgacgcaggtgagcctacatgatgtgattatgaactggaaacatacaggcacttcctacatactcaagagctcctcaacaagtggatgaaaaagagaaagtcaccattgatcagctcaatccacaactacaaccccacgatttcacacagcacaacaaccaccgccaccaacatccacatgacaaccacacatacacacccacatacatatatacacatatcttagttaaataaaatcaggataaataatggatcctaacatgacctcacaccagatcaccctcgagatcaacatgaccagcagccgtattggcacatacactacaccagccccaacagctcttctccttgcatgtgccgtcatcaacacagtgtgtgcgctgataatggcctgcagcagtagaagcactgccacatcaggcattgtcagcagccaatgcacagttcatcccaatcaccctccaccaagttatggcgtcaatgtaactggtctgccgggtaacctatactcaaggaacactacataacattataaataacagaaattatccttcaataaaccccaggccagacagctttaccctgctagacgattcaatcagcccttgcagtatgtcgtctagttaacaaaaaaccggtaggataagtactatcctattggaaccaaacgagacctgtagagcagctcacacaagagaaccacaagctgacttcacctagtatgggaaggaacttagaagtgagtggcagcattaccaatttgaactttgagagaactcagcatcctgacacatttaggactgttgtaaaagtgaaccaaatgtgtaagcttattgcaggtgtgctcacaagtgctgctgtggcagtttgtgtgggggtcataatgtattctgttttcacatcaaaccacaaggccaactccacgcagaatgccacgacccggaacagcacatccacccctccccaaccaaccgccggtctgcccaccacagagcaagggaccatccccagattcaccaaaccccccaccaaaaccgccacccaccatgagatcacagagcccgtcaaaatggcaacaccttcagaggatccctaccaatgctccagcaatggttatttggaccgacctgatttacctgaaaatttcaaactcgtattggatgttatatgcaagcctccaggtcctgaacatcacaacaccagctgttatgagaaacgtgaaatcaacccaggaagtgtttgccctgatcttgtaacaatgaaggcaaacatgggcttaaacaatggtggtggggaggatgctgcaccttatatagaggttaccaccctttctacgtactccaacaaaagggcaatgtgtgtccacaatgggtgtgatcaaggcttctgtttcttcctttctggtttaagcactgatcaggagagagctgtgctagagcttggaggtcaacaggctatcatggagttgcattatgattcctactggaaacactattggagtaactctaattgtgttgttcccagaacaaactgcaacctgacagaccaaactgagattttgtttcctaggtttaacaacaagaatcagtctcagtgtaccacctgtgcagattcagctggcctagataacaaattttatctcacatgtgatgggcttttaagaaccctccctctagttggactacccagcctaagtcctcaggcttacaaagctgtacccacacaaactacaggcaccaccacggcaccaacatcagagacgaggcacccaacccctgcacccaggaggtccaaacctctcagtcggaagaagagagctttatgtggtgtagactcaagcagagaacccaaaccaacaatgccttactggtgtcctatgctccaattatttccaaggaggtctaattcttaagtgacctattcctgaattaacttcagaataagtaccaaccttatcagtagttaatgaaaactaagctttgatataataggacaaatatgattcctggcaggatctttctagtccttctggtgatcttcaacaccaagccaattcacccaaatacattaacagaaaaattctatgagtccacatgtagtgttgagactgcaggttataagagtgcccttagaacaggttggcatatgacagttatgtcaattaagttgtctcaaataaatattgagtcatgcaagagcagcaactcgttattggctcatgagcttgcaatctatagtagtgcagtggatgaattgagaacgttatcatccaatgccttgaagtccaaaaggaagaagaggttcctcggtttgattcttggtctcggagctgcagtcactgccggggtggctttagccaagacagtgcaacttgaaagtgagattgcattgattagagatgcagtgagaaatacaaatgaggctgttgttagcctaaccaacggcatgtcagtgttggctaaagtggtggatgatttgaaaaacttcatatctaaagaattactcccaaaaataaaccgagtctcttgtgatgtgcacgacatcactgccgtcattagattccaacagctcaacaaaagacttttggaagtatctcgtgaattttcatctaatgcaggattaacacacactgtttcatcttttatgttaacagaccgggaactcacctccattgtaggcggcatggctgtttcagcaggccaaaaagagataatgctatctagcaaagctataatgagaagaaatgggttagcaatattaagttcagtcaacgctgacacactggtttatgtaatacaactcccattatttggtgttatggacacagattgttgggtaataagaagttctatagactgtcataacatagcagacaagtatgcttgtttggctagagctgataatggctggtattgtcacaatgctggctcattatcatacttcccgtcgccaacggattgtgagatccacaatgggtatgctttctgtgacactctaaaaagtctaactgtacctgtaacatcacgagaatgcaactcaaacatgtataccactaactacgattgtaagatttccacaagtaaaacttatgtgagtacagcggtactgactacaatgggttgcttggtatcttgttatggtcataacagttgcacagtcatcaataatgacaaaggtataataaggactctgccagatggttgccactacatctccaacaaaggtgtggacagggttcaagtaggtaacactgtttactatcttagcaaagaagttggcaagtcaattgttgtcagaggggaaccattggtcttgaaatatgaccctttgagtttccctgacgataaatttgatgttgctataagagatgtggagcatagcatcaatcagacacgcacattcttgaaggcctctgatcagttattggacttaagtgaaaacagagagaataaaaatttaaacaagtcatatatactaacaactctgctcttcgttgtaatgcttattataataatggctgtcatagggttcattctgtataaggtattgaaaatgatcagagacaacaagttgaaatccaaaagtacacctggcctcacagttttatcatgacaattgtaccaaaccataattgagttagttaattaaaaacttaggataagtgacaatccagacccaacacctctttcaactctcaaggataaggtaggatgagtgtgagaccttgcaaatttgaggttcaagggttttgttccagagggaggaattgcaagtatagtcataaatattgggaatggcctttgaaaactcttatgctcaggcagaactacatgcttaataggatttataggttcctcgacaccaacacagatgcaatgtcagatgtcagcggatttgatgcaccacaaaggactgctgagtatgccttgggaaccataggtgtgctgaaaagttacctggaaaaaactaacaacatcactaaatcaatagcttgtggcagtttgatcactgtattgcagaacttggatgttggtctagtaatacaagcaagagatagcaacactgaggacaccaattacttgagaagttgcaacactatactgtcttatatagacaagatacacaagaagagacaaattattcacattctcaaaagactgccagtaggagtactatgcaatctgatccaatctgtcatctccatcgaggagaagataaattcttctatgaaaacagaatgataaggctgcctaaatactatccagccatactgcataagatgtatattattagagtaaatagaaacctcacttacgatgggtctggaccatccacaataatagatgcaggaaagtctgtggtgtggaatcgtgttgatgtgatagcttgtgtgaaagaggccttgtgctgcatagaattcagctggaataaccaagtgatcatagactttgattatagccaggccagatgatgtggactgtattcctttttttgtcagtaatcagttattaacccaaaattgttaattatgtagactttaagttaactaacttcatgttaattcaatagttatataaaaaaatattcgaattaggatcaatatggatcctattgatgaacaagaagttaatgtgtacttgccggatagctacttaaagggtgttatatcttttagtgaaactaatgctcttggcagctgtatcattggtagacctttcttgaaggatgactttactgccactacttcaatccgtaaccccctaattgaacataaaagaataagggacactaaattagtaaaaaatattgtttcaaaccctcaatataggttagtggagcctctccaaatgcagcatgagctcttgagtgtactatcgcccaatttcatattgcacactgccaacttaaggaaaattatacaaagaagtgttgacataacagataaaaagttgaaccccattttgcacattttgaatcttaattctcctaaccaagagggtaaggtgtcggaacggctaactaggctaattaagaaacatctctctcacatacctaattgggtaagcagctggtacaatatatgggtcaatcttaacaacttactgcaggagtaccgttcaaaggaagttatagaccataactgtgttctgactaggcaattgtctggaagtttcatacatgtggtcatgagtcaatatggagttgtgataattagcaaaaaaagtaaaagatatacaatgtgtacttataaccaattcctaacctggaaggaccttgccttgagcagatttaatgccaattatgtggtctggctaagtaatgtgttaaacacactcaacgaggggttgggattaaggtgtagattaaaaggtcatctgctcagtaagttgtacatttccactgacatctttttatcttcaacatctaatgaattttataatgtggtcaaggaatttgagggcttcatcatgtcactgatattgaaacaaactgaggaagccttatttagcacaaggttttataataacatgttgaacaacttaattgatgccattgatagggctcgactagagtatctggcccgctgtgccaattcagctgccaggattaatttacctagtacagatgttatgatagcatcattgggtgatatcttatctttgataaacgttttaggtgaatccaaccttaacaacttaagtgagttatattttatcttcaggatatttggtcaccctatggttgatgagaggaaggccatggatgcagtcagagataactgttgtgaaacaaagtttctgacggctaagaaccttgcatcgttaagaggagcatatgtttatagaattatcaaaggattcgtagcaaattataacaggtggccttacataaaaactagagtttgccttacaccaacatggattaactatcttgacaccaattcatgtccctcattattagagatgacagaagatgattttattgtgttagctggagtgcactttataagagaattccacatcccaaagctaactgatctggagattatattaaatgacaaggccatatctcctccaaaatcactcatttggtcatgctttccaaaaaactacatacctcaggttatacaagatgagtatgcccggaggtattgtagagctaaagcacctttgaagacaagacgtgtcttggagttctacttacaggacaaggatttcaagttggatcagctccatagagtagtagtgaaccaggactaccttaatgataaagaacatataatttctttaacaggaaaagaaagagagttgggtgttggtaggatgtttgccatgcaacctgggaagcagaggcaagtccaaattttagcagagaagctgttggctgataacatcctgcaattctttccggagacactgactagatacggtgatttggagctgcaaaagatactagagttaaaagctggactttcaaataaaaatgacagatctaaagactcctacaataattatataagtaggtgctcattaattactgatttaagtaaatttaaccaagcttttaggtacgagtcatcctgtgtgtgtagtgatcttttagatgagctacatgggactcaaagcttattctcttggctgcatttaacagtaccactgactactataatgtgtacatataggcatgcgccgccggacactggaaacaactataatgtagatgatattgctgagcagagtggactctaccgctaccacatgggcgggattgagggctggtgccagaagctctggacaacagaggccattgctttgctagatactgtagctgtgaagggccgtttccagctaacttcattaataaatggcgacaaccaaagtattgatatttcaaaaccaacaaggctggggaccaggactcaaagtgaagcagattatgatttggcaataaattctttaagattaatatcagcagcttataaaggcattggacataaattaaaagaaggtgagacctacttgtcacgtgacatgcagttcatgagtaaaacaatacaacatgaaggggtctactacccggcctccatcaagaaaatattaagagttggtccctggatcaacacaatattagatgatataaaaacttcaacagaaagtattggttctctaactcaagaactagaatataaaggtgaaagtttaatgagcagcctgctgctgaggaacttctggctctacagattatattcagtggatttaaaagatcattctttgtgtggaaagcagctctacagatccttaataaaagtgttaaaacatttgaagaggtgcttcaacctggagaaccttggggaatgtttggaattatttttaaatgtgcccatgcagtttggaggtgctgacccaaatgtcatctacaggagcttctacagaagaactccagattttctaacagaaagtataactcatctcatcctcattttaaaacattttagaagagatttggaattcaacaaagataatgtctccaaagctgttctttctttgctagagttcaccaagaatgattctgcagaatttgtaactttgatgagagatcctcaagcaattggtagtgagaggcaggccaagatcacttcagacatcaacagaacagctgtaacttcagtgttatcaaatgctccaaatgaaatatttagaacttcagctcttcattacagcagcacagaaaatgaattaaatggaatagcaagtggagtttctcctgtttatcctcatggtcttcgagttttatatgaaagtttacctttttataaagcagagaagattgtcaacatggtttctgggaccaagtccatcaccaacatactggagaagacatcagccatctcctacacagatataattcgagccaccaacatgatggtggagaacctcactttgctaacaagaataatgaaaccaggtgctgacacatctttggatcctgacacaatagtaataacaatattatcaaaaataataagagataaatcctgggatgttggtgatataattggtgtcacttccccatctcctgtctcctgcttcaaggtggtctacacatcaactctacaaaataattcagtagtaatagaaagatacacaacagacacctacacaagaggtaagagaggccccaccaagccctgggtgggcagcagcacacaggagaagaagtccatgcctgtctacaacagacaagttttaacaagaggacaaagagatcaaatagaaaatatagcaaagctggagtgggtgttttcttcagtagcaaatattgattctttgctaaatgagctcagcaccatgactttgggtctttctctaaggaaatgtagacaactttttccaacatatttaagtttaaacttcctgcacaggctttctgtcagcagcaggcccagagaatatccttcttctcttcctgcctacaggacaacaaattttcattttgatactggaccaataaataaagtgttaacagaaagatttggagatgaagatataaatttggtatttcaaaatgcaatatcatatggtctttccaccatgtctttggtggagcagtttactggtgtctgtccaaataaagttttgctggtgcccaagctacaagaaatacaactaatgaaagttccaatatttcaaggtggcttcaacctacaaagtataattccaataataaggcagcagcacatgttcctgcccaaccacatcactccagcccagtatattgaattatttctttcttcaaaacaatttcattcaagaataaatttaaaacacaacaacagatttaaacttgttttacaaaaagattattttaatggggagaacatgatagaaactttgtccacctgtttggcaggccactggatcatcattttgatgctaatgaaggagagtcaggggatatttgacaaggagtggtatgatggttttgtaacagaccacatgttcctggacctgcagctcttcctctcctccttcaagacatttctaactgtcttcaactttgcttatttaaaagttggttcaaatatagaagaaataacaggaaatcaagccaacctgctggagctgctggacctgggctactggaagaacatgtataaagtattttcagagaccaaggtgcggctggctttgctaaaacaagatttatcatttaattctgtgaagaacagcagcagcttccggcactggtttataaattctctacaagaagtacaatgtacttctgtgccttgggtggtaaatgtaacaagaaatccaactcatttaaaaggtgttctacagtacatgaagatgatagaaagtggcatgattcaaggttattcagcaaatatttcttcagttttaagtatcccatataattatccagacatggcgcacatgatgacaaaaataataagaaatcgaggccacatgtcctatgattatccaaagatgaagaaaagtttaactttctccatgacagacatgagtgacagctacatgctcaacctcttccccaaagtagaatgttcttacatgagtggttatttggataaactagatgatactctacaacttctaaagaaacctcctgttggaagaaaagttccttctgtggctttgccctggcaccactgcaacagatacaactttgtcttcagcagcacaggctgcaaagtttctgtcattgacatgcttccaaaacatttccgaagaagtaatttaaaagtaatatgttttattggagaaggggcgggcaacctcatgctaagagctgttttggaagttggtggaaatataaaattaatatatagatccttaaaagatcctgatgatcatcatgttcctgtagaatttctaagattaaaaccttgttatccttatattgatactggtggcagtttatctttggcttcaacagatgccaccaacaaggcccactgggattatttacatcttcactggacagatcctttaaatttaatagtatgtgatgcagaaataagtggtgtgaagcactggctaaaaattcttcacaggtggtatgagcacatgacttcctgcaagcactgtttaaaatcagaacatgataaatatttaataataaaatatcatgctcaagatgatttaatagatcttcctcatggtgtcaggctactaaaatgtaacatctgcctgggctccaaactaagtggcagtgagagctacctgctcattggtcttggtctttcaaataaacttcctgtctacagtgaagttcttcattcaaaacttcttttggcagaatgtcatcagtttcatcatccaaaatatttggatgtttctggaataaatacaaatataaaatccttaataccaatgttggattatccaataacttacaacaagatcaccactttgctagaaagtgtgcgggagctttcttcaaataaaaacaagaacaccatgtggattggaagaaatcctgtctaccataataaatggctaaagaggaaatatttcaacattttaaaatggctaaaatactgtatagaacttcctgccttcaggatggattataattcatttgagagaatagaaatgctttatccaaatttaagagatttggtagattctgtttctacttcagagctgaagaaagtaataaaagtaacaggcatcctcttcaggagcaacaccatgtgaattaatatgccaatgctaacatgtcatccccactactttttttgttcaatcactctcagtctagacatgtgagaagatcccaaacccaactgcacccctcccactcgaaatcagttgtagcctcagcagctccatctgccatgatctctgaccagcagcaaatgtattattattttaatttgtctatagttaacaaaaaattgatatctcacaggttgtaaacatagttcttttataattattgttagttaaactattgtgtttgacttcctttgggtatttttttcccgtgggtcggcatggcatctccacctcctcgcggtccgacctgggcatccgaaggaggacgcacgtccactcggatggctaagggagagcctgcagtagcataaccccttggggcctctaaacgggtcttgaggggttttttgctgaaaggaggaactatatacgcgtcgacgggcccgcgctcactggccgtcgttttacaacgtcgtgactgggaaaaccctggcgttacccaacttaatcgccttgcagcacatccccctttcgccagctggcgtaatagcgaagaggcccgcaccgatcgcccttcccaacagttgcgcagcctgaatggcgaatgggacgcgccctgtagcggcgcattaagcgcggcgggtgtggtggttacgcgcagcgtgaccgctacacttgccagcgccctagcgcccgctcctttcgctttcttcccttcctttctcgccacgttcgccggctttccccgtcaagctctaaatcgggggctccctttagggttccgatttagtgctttacggcacctcgaccccaaaaaacttgattagggtgatggttcacgtagtgggccatcgccctgatagacggtttttcgccctttgacgttggagtccacgttctttaatagtggactcttgttccaaactggaacaacactcaaccctatctcggtctattcttttgatttataagggattttgccgatttcggcctattggttaaaaaatgagctgatttaacaaaaatttaacgcgaattttaacaaaatattaacgcttacaatttaggtggcacttttcggggaaatgtgcgcggaacccctatttgtttatttttctaaatacattcaaatatgtatccgctcatgagacaataaccctgataaatgcttcaataatattgaaaaaggaagagtatgagtattcaacatttccgtgtcgcccttattcccttttttgcggcattttgccttcctgtttttgctcacccagaaacgctggtgaaagtaaaagatgctgaagatcagttgggtgcacgagtgggttacatcgaactggatctcaacagcggtaagatccttgagagttttcgccccgaagaacgttttccaatgatgagcacttttaaagttctgctatgtggcgcggtattatcccgtattgacgccgggcaagagcaactcggtcgccgcatacactattctcagaatgacttggttgagtactcaccagtcacagaaaagcatcttacggatggcatgacagtaagagaattatgcagtgctgccataaccatgagtgataacactgcggccaacttacttctgacaacgatcggaggaccgaaggagctaaccgcttttttgcacaacatgggggatcatgtaactcgccttgatcgttgggaaccggagctgaatgaagccataccaaacgacgagcgtgacaccacgatgcctgtagcaatggcaacaacgttgcgcaaactattaactggcgaactacttactctagcttcccggcaacaattaatagactggatggaggcggataaagttgcaggaccacttctgcgctcggcccttccggctggctggtttattgctgataaatctggagccggtgagcgtgggtctcgcggtatcattgcagcactggggccagatggtaagccctcccgtatcgtagttatctacacgacggggagtcaggcaactatggatgaacgaaatagacagatcgctgagataggtgcctcactgattaagcattggtaactgtcagaccaagtttactcatatatactttagattgatttaaaacttcatttttaatttaaaaggatctaggtgaagatcctttttgataatctcatgaccaaaatcccttaacgtgagttttcgttccactgagcgtcagaccccgtagaaaagatcaaaggatcttcttgagatcctttttttctgcgcgtaatctgctgcttgcaaacaaaaaaaccaccgctaccagcggtggtttgtttgccggatcaagagctaccaactctttttccgaaggtaactggcttcagcagagcgcagataccaaatactgtccttctagtgtagccgtagttaggccaccacttcaagaactctgtagcaccgcctacatacctcgctctgctaatcctgttaccagtggctgctgccagtggcgataagtcgtgtcttaccgggttggactcaagacgatagttaccggataaggcgcagcggtcgggctgaacggggggttcgtgcacacagcccagcttggagcgaacgacctacaccgaactgagatacctacagcgtgagctatgagaaagcgccacgcttcccgaagggagaaaggcggacaggtatccggtaagcggcagggtcggaacaggagagcgcacgagggagcttccagggggaaacgcctggtatctttatagtcctgtcgggtttcgccacctctgacttgagcgtcgatttttgtgatgctcgtcaggggggcggagcctatggaaaaacgccagcaacgcggcctttttacggttcctggccttttgctggccttttgctcacatgttctttcctgcgttatcccctgattctgtggataaccgtattaccgcctttgagtgagctgataccgctcgccgcagccgaacgaccgagcgcagcgagtcagtgagcgaggaagcggaagagcgcccaatacgcaaaccgcctctccccgcgcgttggccgattcattaatgcagctggcacgacaggtttcccgactggaaagcgggcagtgagcgcaacgcaattaatgtgagttagctcactcattaggcaccccaggctttacactttatgcttccggctcgtatgttgtgtggaattgtgagcggataacaatttcacacaggaaacagctatgaccatgattacgccaagcgcgcccgggtaatacgactcactataggg

SEQ ID NO: 29 - DNA, 18756 bp, synthetic construct
  source 1..18756: mol_type = other DNA
acgcgaaaaaatgcataacaaaactatcaacctgaaaaaagttaggacaagtgaagattgctagtcccaaagaccagaatcatgggctgtaatgtgatgatggagcttgattatggtggacgagctgcatggctggcattccacataaccaactttgataggtcagatttggaaactatcctaagaggtgctagggtgtgcaatacatggcaagatcagagactctccgtgtaccttgtgggaagggattgcaatttgttaagaccatttgtgcaagctgccaaatttatccataatactaggagaggccaaacattaacacattggttcacaaaaaatatcgtgtttagttctacagggcaagagacagagcctcccattgaccccacatgtgagctgttggtagagctgatcagtggttaagatgacagcacattatgtagttaattaaaacaaagggtaggacaagtcctaatgtccacagctatgaacaagttcactcagaccatctctaaacctgccactatcttgaatatttcagacagtgaagagtcgggcgatgaggcaggggtgggcaaggtgtcccgtaccacacagagctcagagaggtggcttgatttgctcattgaaaagttccagccgagcctacaaaacatcactagatacatcaactggaacttcatcaggatctgcaatgataggcttaaaaaagaaaaaatggggtacattgaggccaagcaatatgtggaagacatggcttggatggtgatagcatctgaggcagacagcattgagtggaagtgcataaggaggcaggagaaagtgactggggtgaaatacccaaagttcttctttgtacaacacaaagaggactggattgagtgcacaggatgcattccgtacccaggccatgacttgatctatgatgaggatgatgatgactgagctgactcagatcactccaaccagcagagagatccatagttatagaaaaacattaggataaatacacatcctaggccgccaccatgttcgtgtttctggtgctgctgcctctggtgagctcccagtgcgtgaacctgaccacaaggacccagctgccccctgcctataccaattccttcacacggggcgtgtactatcccgacaaggtgtttagatctagcgtgctgcactccacacaggatctgtttctgcctttcttttctaacgtgacctggttccacgccatcagcggcaccaatggcacaaagcggttcgacaatccagtgctgccctttaacgatggcgtgtacttcgcctccaccgagaagtctaacatcatcagaggctggatctttggcaccacactggacagcaagacacagtccctgctgatcgtgaacaatgccaccaacgtggtcatcaaggtgtgcgagttccagttttgtaatgatccattcctggacgtgtactatcacaagaacaataagtcttggatggagagcgagtttcgcgtgtattcctctgccaacaattgcacatttgagtacgtgtcccagcccttcctgatggacctggagggcaagcagggcaatttcaagaacctgagggagttcgtgtttaagaatatcgatggctacttcaagatctactccaagcacaccccaatcaacctggggcgcgacctgccacagggcttctctgccctggagccactggtggatctgcccatcggcatcaacatcacccggtttcagacactgctggccctgcacagaagctacctgacaccaggcgacagctcctctggatggaccgcaggagctgccgcctactatgtgggctatctgcagcccaggaccttcctgctgaagtacaacgagaatggcaccatcacagacgccgtggattgcgccctggatcccctgtctgagaccaagtgtacactgaagagctttaccgtggagaagggcatctatcagacaagcaatttcagggtgcagcctaccgagtccatcgtgcgctttcccaatatcacaaacctgtgcccttttgacgaggtgttcaacgcaacccgcttcgccagcgtgtacgcctggaataggaagcgcatctccaactgcgtggccgactattctgtgctgtacaactttgctccattcttcgcctttaagtgctatggcgtgagccccacaaagctgaatgacctgtgctttaccaacgtgtacgccgattccttcgtgatcaggggcaacgaggtgagccagatcgcccctggccagacaggcaacatcgccgactacaattataagctgcctgacgatttcaccggctgcgtgatcgcctggaactctaacaagctggatagcaaagtgggcggcaactacaattatcggtaccggctgtttagaaagtctaatctgaagccattcgagagggacatctccacagagatctaccaggccggcaacaagccctgcaatggcgtggctggcgtgaactgttatttccctctgcagagctacggcttcaggccaacatacggcgtgggacatcagccctaccgcgtggtggtgctgtcttttgagctgctgcacgcacctgcaacagtgtgcggaccaaagaagagcaccaatctggtgaagaacaagtgcgtgaacttcaacttcaacggactgaccggcacaggcgtgctgaccgagtccaacaagaagttcctgccttttcagcagttcggcagggacatcgcagataccacagacgccgtgcgcgaccctcagaccctggagatcctggatatcacaccatgctccttcggcggcgtgtctgtgatcacaccaggcaccaatacaagcaaccaggtggccgtgctgtatcagggcgtgaattgtaccgaggtgcccgtggcaatccacgcagatcagctgacccctacatggcgggtgtactctaccggcagcaacgtgttccagacaagagccggatgcctgatcggagccgagtacgtgaacaatagctatgagtgcgacatccctatcggcgccggcatctgtgcctcctaccagacccagacaaagtcccacgggtctgcctcctctgtggccagccagtccatcatcgcctataccatgagcctgggcgccgagaattccgtggcctactccaacaattctatcgccatccctaccaacttcacaatctccgtgaccacagagatcctgccagtgagcatgaccaagacatccgtggactgcacaatgtatatctgtggcgattccaccgagtgctctaacctgctgctgcagtacggctctttttgtacccagctgaagagagccctgacaggcatcgccgtggagcaggacaagaacacacaggaggtgttcgcccaggtgaagcagatctacaagaccccacccatcaagtactttggcggcttcaacttcagccagatcctgcccgatcctagcaagccatccaagcggtcttttatcgaggacctgctgttcaacaaggtgaccctggccgatgccggcttcatcaagcagtatggcgattgcctgggcgacatcgccgccagagacctgatctgtgcccagaagtttaatggcctgaccgtgctgcctccactgctgacagatgagatgatcgcccagtacacatctgccctgctggccggcaccatcacaagcggatggaccttcggcgcaggagccgccctgcagatcccctttgccatgcagatggcctatcggttcaacggcatcggcgtgacccagaatgtgctgtacgagaaccagaagctgatcgccaatcagtttaactccgccatcggcaagatccaggactctctgagctccacagccagcgccctgggcaagctgcaggatgtggtgaatcacaacgcccaggccctgaataccctggtgaagcagctgtctagcaagttcggcgccatctcctctgtgctgaatgatatcctgagcaggctggaccctccagaggcagaggtgcagatcgaccggctgatcacaggcagactgcagtccctgcagacctacgtgacacagcagctgatcagggcagcagagatcagggcctctgccaatctggccgccaccaagatgagcgagtgcgtgctgggccagtccaagagagtggacttttgtggcaagggctatcacctgatgagcttcccacagtccgcccctcacggagtggtgtttctgcacgtgacctacgtgccagcccaggagaagaacttcaccacagcaccagcaatctgccacgatggcaaggcacactttcctagggagggcgtgttcgtgagcaacggcacccactggtttgtgacacagcgcaatttctacgagccacagatcatcaccacagacaatacattcgtgtccggcaactgtgacgtggtcatcggcatcgtgaacaataccgtgtatgatcctctgcagccagagctggactcttttaaggaggagctggataagtacttcaagaatcacaccagccccgacgtggatctgggcgacatctctggcatcaatgccagcgtggtgaacatccagaaggagatcgacaggctgaacgaggtggccaagaatctgaacgagtccctgatcgatctgcaggagctgggcaagtatgagcagtacatcaagtggccctggtatatctggctgggcttcatcgccggcctgatcgccatcgtgatggtgaccatcatgctgtgctgtatgacaagctgctgttcctgcctgaagggctgctgttcttgtggcagctgctgtaagtttgatgaggacgatagcgagcctgtgctgaagggcgtgaagctgcactacacctgatagccacctatagcaagtgatgtagtatttagtctatgattagttatagaaaaacattaggataaatacacatcctaggccgggccaaaatgtctctagacagattgaagctcaatgatgtctcaaacaaggatagcctgctgtccaactgcaaatacagtgttaccagatccacaggcgatgtaaccagtgtgtctggtcatgctatgcagaaagcccttgcaaggacactcggcatgttcttacttactgccttcaaccgttgcgaagaagtggcagaaatagggctccaatatgccatgtccttgctaggcagagatgatagcatcaagatattaagagaagccggctacaatgtaaaatgtgtggacacacagctcaaggactttacaatcaaattacaaggaaaggaatacaaaatacaagtcctagatatagtgggaatagatgcagccaatttagctgatctagagatacaagccagaggagtggtagcaaaagaactcaaaacaggagccaggctacctgacaatcggaggcatgatgcaccagattgtggtgtgatagttctctgtattgcagcattagttgtttccaaattagctgcaggggacaggggaggacttgatgctgtggaaagaagggctttaaatgtgctgaaagccgagaaagccaggtaccccaacatggaggtcaagcagatagctgaaagtttttatgatctgtttgaaaggaagccttattacattgatgtcttcatcacttttggcctggcccagtctagtgtcaagggaggcagcaaagttgaggggctgttttcaggtctcttcatgaatgcatacggggcaggacaagttatgctgaggtggggtttactggcaaaatctgtcaagaacatcatgctaggccatgctagtgtacaagctgagatggaacaggtggttgaggtttacgaatatgctcagaagcaaggaggggaggcaggattctatcacatcagaaataatccaaaagcttcacttctctctttgaccaattgtcctaatttcaccagtgttgtgcttggcaatgctgcaggtttaggcatcatagggtcatataagggtgctcctaggaatagagaactctttgatgctgccaaagattatgcagaaagattaaaggacaacaatgtaattaactacagtgcattaaacttgactgcagaagaaagagagctgatcagccagcagctgaacattgttgatgacactcctgatgatgatatttaattaaaactggaaaatgtaggataaatatggagaaattcgcccccgaatttgttggcgaggatgctaacaagaaggcagaggagtttctcaaacatagatccttcccttcggaaaaaccactagctggtataccgaacactgccactcatgtcaccaaatataacatgccccctatattgcgtagctcattcaaactcccttccccgagagttgctgcaaatcttactgaaccctctgctccccctaccactccaccacccacacctccccagaacaaggaagagcagcccaaagagtctgatgttgacattgagactatgcatgtctgtaaggttcctgacaatccggaacacagcaagaagccatgctgctcagatgataccgatactaagaaaactaggaagccgatggtcacctttgtggaacccgaggagaaatttgtcggattgggagctagcttgtacagggagaccatgcagacctttgctgctgatggttatgatgaagaaagcaacctatcgtttgaggagactaaccaagagccgggttcttcatctgtagaacaaagactagatagaatagaggagaaattgtcctacataataggccttttaaacaccataatggtagcgactgctggacctaccactgctagagatgagattagagatgcccttataggcactagagaagaacttattgagatgatcaagtctgacatcttgactgtcaatgacagaatagtggccatggagaagctcagagatgaggaatgctccagagctgacactgatgatggatcagcctgttatttaacagacagagcaaggatactagataagatagtgtccagcaatgctgaagaggctaaggaagatttggatgttgatgacatcatgggcattaatttttagttaattaaaataacaacaggacaaataatggaggcctacttggtagagatgtaccatggtgtcccatatacagctgcagtacagctaaacttggttgaaaaacattcagccaacatatcactaactgtgtggataccgatgtttcaaacatctctaccaaagaactccgttatggacctgctacatgatgttacagtcatttgtacacagatatcaacagtgcatggtcccatgatcaaggtagatctgagctcttccaatgcaggtttagctaccatgccaaggcaattcttgataaatgctatcatagctttggatgactggggcaacatggattacgaagtgcctgttgcttttgataaaaagagcttctgtgtgacaattcttaagcctaaaaacatgctttacactgtacccagcattactcccactaatcgacctactcatgagctgatagctgtctgctctttccataacagggtaacattaaagtcattcaatatacctgtcttcatcagagcactgtctatcagacagcaggaccttgatagtgtggagcaggctataagctccgatgtggaccatgctataacaacagctagggtggctccctatgcagggcttacacttgtgatcaacatcacatccaccaaaggagcattcaaactgctaaaggcaggtagtcagattcttgcagaactgggtccctatctgacgcaggtgagcctacatgatgtgattatgaactggaaacatacaggcacttcctacatactcaagagctcctcaacaagtggatgaaaaagagaaagtcaccattgatcagctcaatccacaactacaaccccacgatttcacacagcacaacaaccaccgccaccaacatccacatgacaaccacacatacacacccacatacatatatacacatatcttagttaaataaaatcaggataaataatggatcctaacatgacctcacaccagatcaccctcgagatcaacatgaccagcagccgtattggcacatacactacaccagccccaacagctcttctccttgcatgtgccgtcatcaacacagtgtgtgcgctgataatggcctgcagcagtagaagcactgccacatcaggcattgtcagcagccaatgcacagttcatcccaatcaccctccaccaagttatggcgtcaatgtaactggtctgccgggtaacctatactcaaggaacactacataacattataaataacagaaattatccttcaataaaccccaggccagacagctttaccctgctagacgattcaatcagcccttgcagtatgtcgtctagttaacaaaaaaccggtaggataagtactatcctattggaaccaaacgagacctgtagagcagctcacacaagagaaccacaagctgacttcacctagtatgggaaggaacttagaagtgagtggcagcattaccaatttgaactttgagagaactcagcatcctgacacatttaggactgttgtaaaagtgaaccaaatgtgtaagcttattgcaggtgtgctcacaagtgctgctgtggcagtttgtgtgggggtcataatgtattctgttttcacatcaaaccacaaggccaactccacgcagaatgccacgacccggaacagcacatccacccctccccaaccaaccgccggtctgcccaccacagagcaagggaccatccccagattcaccaaaccccccaccaaaaccgccacccaccatgagatcacagagcccgtcaaaatggcaacaccttcagaggatccctaccaatgctccagcaatggttatttggaccgacctgatttacctgaaaatttcaaactcgtattggatgttatatgcaagcctccaggtcctgaacatcacaacaccagctgttatgagaaacgtgaaatcaacccaggaagtgtttgccctgatcttgtaacaatgaaggcaaacatgggcttaaacaatggtggtggggaggatgctgcaccttatatagaggttaccaccctttctacgtactccaacaaaagggcaatgtgtgtccacaatgggtgtgatcaaggcttctgtttcttcctttctggtttaagcactgatcaggagagagctgtgctagagcttggaggtcaacaggctatcatggagttgcattatgattcctactggaaacactattggagtaactctaattgtgttgttcccagaacaaactgcaacctgacagaccaaactgagattttgtttcctaggtttaacaacaagaatcagtctcagtgtaccacctgtgcagattcagctggcctagataacaaattttatctcacatgtgatgggcttttaagaaccctccctctagttggactacccagcctaagtcctcaggcttacaaagctgtacccacacaaactacaggcaccaccacggcaccaacatcagagacgaggcacccaacccctgcacccaggaggtccaaacctctcagtcggaagaagagagctttatgtggtgtagactcaagcagagaacccaaaccaacaatgccttactggtgtcctatgctccaattatttccaaggaggtctaattcttaagtgacctattcctgaattaacttcagaataagtaccaaccttatcagtagttaatgaaaactaagctttgatataataggacaaatatgattcctggcaggatctttctagtccttctggtgatcttcaacaccaagccaattcacccaaatacattaacagaaaaattctatgagtccacatgtagtgttgagactgcaggttataagagtgcccttagaacaggttggcatatgacagttatgtcaattaagttgtctcaaataaatattgagtcatgcaagagcagcaactcgttattggctcatgagcttgcaatctatagtagtgcagtggatgaattgagaacgttatcatccaatgccttgaagtccaaaaggaagaagaggttcctcggtttgattcttggtctcggagctgcagtcactgccggggtggctttagccaagacagtgcaacttgaaagtgagattgcattgattagagatgcagtgagaaatacaaatgaggctgttgttagcctaaccaacggcatgtcagtgttggctaaagtggtggatgatttgaaaaacttcatatctaaagaattactcccaaaaataaaccgagtctcttgtgatgtgcacgacatcactgccgtcattagattccaacagctcaacaaaagacttttggaagtatctcgtgaattttcatctaatgcaggattaacacacactgtttcatcttttatgttaacagaccgggaactcacctccattgtaggcggcatggctgtttcagcaggccaaaaagagataatgctatctagcaaagctataatgagaagaaatgggttagcaatattaagttcagtcaacgctgacacactggtttatgtaatacaactcccattatttggtgttatggacacagattgttgggtaataagaagttctatagactgtcataacatagcagacaagtatgcttgtttggctagagctgataatggctggtattgtcacaatgctggctcattatcatacttcccgtcgccaacggattgtgagatccacaatgggtatgctttctgtgacactctaaaaagtctaactgtacctgtaacatcacgagaatgcaactcaaacatgtataccactaactacgattgtaagatttccacaagtaaaacttatgtgagtacagcggtactgactacaatgggttgcttggtatcttgttatggtcataacagttgcacagtcatcaataatgacaaaggtataataaggactctgccagatggttgccactacatctccaacaaaggtgtggacagggttcaagtaggtaacactgtttactatcttagcaaagaagttggcaagtcaattgttgtcagaggggaaccattggtcttgaaatatgaccctttgagtttccctgacgataaatttgatgttgctataagagatgtggagcatagcatcaatcagacacgcacattcttgaaggcctctgatcagttattggacttaagtgaaaacagagagaataaaaatttaaacaagtcatatatactaacaactctgctcttcgttgtaatgcttattataataatggctgtcatagggttcattctgtataaggtattgaaaatgatcagagacaacaagttgaaatccaaaagtacacctggcctcacagttttatcatgacaattgtaccaaaccataattgagttagttaattaaaaacttaggataagtgacaatccagacccaacacctctttcaactctcaaggataaggtaggatgagtgtgagaccttgcaaatttgaggttcaagggttttgttccagagggaggaattgcaagtatagtcataaatattgggaatggcctttgaaaactcttatgctcaggcagaactacatgcttaataggatttataggttcctcgacaccaacacagatgcaatgtcagatgtcagcggatttgatgcaccacaaaggactgctgagtatgccttgggaaccataggtgtgctgaaaagttacctggaaaaaactaacaacatcactaaatcaatagcttgtggcagtttgatcactgtattgcagaacttggatgttggtctagtaatacaagcaagagatagcaacactgaggacaccaattacttgagaagttgcaacactatactgtcttatatagacaagatacacaagaagagacaaattattcacattctcaaaagactgccagtaggagtactatgcaatctgatccaatctgtcatctccatcgaggagaagataaattcttctatgaaaacagaatgataaggctgcctaaatactatccagccatactgcataagatgtatattattagagtaaatagaaacctcacttacgatgggtctggaccatccacaataatagatgcaggaaagtctgtggtgtggaatcgtgttgatgtgatagcttgtgtgaaagaggccttgtgctgcatagaattcagctggaataaccaagtgatcatagactttgattatagccaggccagatgatgtggactgtattcctttttttgtcagtaatcagttattaacccaaaattgttaattatgtagactttaagttaactaacttcatgttaattcaatagttatataaaaaaatattcgaattaggatcaatatggatcctattgatgaacaagaagttaatgtgtacttgccggatagctacttaaagggtgttatatcttttagtgaaactaatgctcttggcagctgtatcattggtagacctttcttgaaggatgactttactgccactacttcaatccgtaaccccctaattgaacataaaagaataagggacactaaattagtaaaaaatattgtttcaaaccctcaatataggttagtggagcctctccaaatgcagcatgagctcttgagtgtactatcgcccaatttcatattgcacactgccaacttaaggaaaattatacaaagaagtgttgacataacagataaaaagttgaaccccattttgcacattttgaatcttaattctcctaaccaagagggtaaggtgtcggaacggctaactaggctaattaagaaacatctctctcacatacctaattgggtaagcagctggtacaatatatgggtcaatcttaacaacttactgcaggagtaccgttcaaaggaagttatagaccataactgtgttctgactaggcaattgtctggaagtttcatacatgtggtcatgagtcaatatggagttgtgataattagcaaaaaaagtaaaagatatacaatgtgtacttataaccaattcctaacctggaaggaccttgccttgagcagatttaatgccaattatgtggtctggctaagtaatgtgttaaacacactcaacgaggggttgggattaaggtgtagattaaaaggtcatctgctcagtaagttgtacatttccactgacatctttttatcttcaacatctaatgaattttataatgtggtcaaggaatttgagggcttcatcatgtcactgatattgaaacaaactgaggaagccttatttagcacaaggttttataataacatgttgaacaacttaattgatgccattgatagggctcgactagagtatctggcccgctgtgccaattcagctgccaggattaatttacctagtacagatgttatgatagcatcattgggtgatatcttatctttgataaacgttttaggtgaatccaaccttaacaacttaagtgagttatattttatcttcaggatatttggtcaccctatggttgatgagaggaaggccatggatgcagtcagagataactgttgtgaaacaaagtttctgacggctaagaaccttgcatcgttaagaggagcatatgtttatagaattatcaaaggattcgtagcaaattataacaggtggccttacataaaaactagagtttgccttacaccaacatggattaactatcttgacaccaattcatgtccctcattattagagatgacagaagatgattttattgtgttagctggagtgcactttataagagaattccacatcccaaagctaactgatctggagattatattaaatgacaaggccatatctcctccaaaatcactcatttggtcatgctttccaaaaaactacatacctcaggttatacaagatgagtatgcccggaggtattgtagagctaaagcacctttgaagacaagacgtgtcttggagttctacttacaggacaaggatttcaagttggatcagctccatagagtagtagtgaaccaggactaccttaatgataaagaacatataatttctttaacaggaaaagaaagagagttgggtgttggtaggatgtttgccatgcaacctgggaagcagaggcaagtccaaattttagcagagaagctgttggctgataacatcctgcaattctttccggagacactgactagatacggtgatttggagctgcaaaagatactagagttaaaagctggactttcaaataaaaatgacagatctaaagactcctacaataattatataagtaggtgctcattaattactgatttaagtaaatttaaccaagcttttaggtacgagtcatcctgtgtgtgtagtgatcttttagatgagctacatgggactcaaagcttattctcttggctgcatttaacagtaccactgactactataatgtgtacatataggcatgcgccgccggacactggaaacaactataatgtagatgatattgctgagcagagtggactctaccgctaccacatgggcgggattgagggctggtgccagaagctctggacaacagaggccattgctttgctagatactgtagctgtgaagggccgtttccagctaacttcattaataaatggcgacaaccaaagtattgatatttcaaaaccaacaaggctggggaccaggactcaaagtgaagcagattatgatttggcaataaattctttaagattaatatcagcagcttataaaggcattggacataaattaaaagaaggtgagacctacttgtcacgtgacatgcagttcatgagtaaaacaatacaacatgaaggggtctactacccggcctccatcaagaaaatattaagagttggtccctggatcaacacaatattagatgatataaaaacttcaacagaaagtattggttctctaactcaagaactagaatataaaggtgaaagtttaatgagcagcctgctgctgaggaacttctggctctacagattatattcagtggatttaaaagatcattctttgtgtggaaagcagctctacagatccttaataaaagtgttaaaacatttgaagaggtgcttcaacctggagaaccttggggaatgtttggaattatttttaaatgtgcccatgcagtttggaggtgctgacccaaatgtcatctacaggagcttctacagaagaactccagattttctaacagaaagtataactcatctcatcctcattttaaaacattttagaagagatttggaattcaacaaagataatgtctccaaagctgttctttctttgctagagttcaccaagaatgattctgcagaatttgtaactttgatgagagatcctcaagcaattggtagtgagaggcaggccaagatcacttcagacatcaacagaacagctgtaacttcagtgttatcaaatgctccaaatgaaatatttagaacttcagctcttcattacagcagcacagaaaatgaattaaatggaatagcaagtggagtttctcctgtttatcctcatggtcttcgagttttatatgaaagtttacctttttataaagcagagaagattgtcaacatggtttctgggaccaagtccatcaccaacatactggagaagacatcagccatctcctacacagatataattcgagccaccaacatgatggtggagaacctcactttgctaacaagaataatgaaaccaggtgctgacacatctttggatcctgacacaatagtaataacaatattatcaaaaataataagagataaatcctgggatgttggtgatataattggtgtcacttccccatctcctgtctcctgcttcaaggtggtctacacatcaactctacaaaataattcagtagtaatagaaagatacacaacagacacctacacaagaggtaagagaggccccaccaagccctgggtgggcagcagcacacaggagaagaagtccatgcctgtctacaacagacaagttttaacaagaggacaaagagatcaaatagaaaatatagcaaagctggagtgggtgttttcttcagtagcaaatattgattctttgctaaatgagctcagcaccatgactttgggtctttctctaaggaaatgtagacaactttttccaacatatttaagtttaaacttcctgcacaggctttctgtcagcagcaggcccagagaatatccttcttctcttcctgcctacaggacaacaaattttcattttgatactggaccaataaataaagtgttaacagaaagatttggagatgaagatataaatttggtatttcaaaatgcaatatcatatggtctttccaccatgtctttggtggagcagtttactggtgtctgtccaaataaagttttgctggtgcccaagctacaagaaatacaactaatgaaagttccaatatttcaaggtggcttcaacctacaaagtataattccaataataaggcagcagcacatgttcctgcccaaccacatcactccagcccagtatattgaattatttctttcttcaaaacaatttcattcaagaataaatttaaaacacaacaacagatttaaacttgttttacaaaaagattattttaatggggagaacatgatagaaactttgtccacctgtttggcaggccactggatcatcattttgatgctaatgaaggagagtcaggggatatttgacaaggagtggtatgatggttttgtaacagaccacatgttcctggacctgcagctcttcctctcctccttcaagacatttctaactgtcttcaactttgcttatttaaaagttggttcaaatatagaagaaataacaggaaatcaagccaacctgctggagctgctggacctgggctactggaagaacatgtataaagtattttcagagaccaaggtgcggctggctttgctaaaacaagatttatcatttaattctgtgaagaacagcagcagcttccggcactggtttataaattctctacaagaagtacaatgtacttctgtgccttgggtggtaaatgtaacaagaaatccaactcatttaaaaggtgttctacagtacatgaagatgatagaaagtggcatgattcaaggttattcagcaaatatttcttcagttttaagtatcccatataattatccagacatggcgcacatgatgacaaaaataataagaaatcgaggccacatgtcctatgattatccaaagatgaagaaaagtttaactttctccatgacagacatgagtgacagctacatgctcaacctcttccccaaagtagaatgttcttacatgagtggttatttggataaactagatgatactctacaacttctaaagaaacctcctgttggaagaaaagttccttctgtggctttgccctggcaccactgcaacagatacaactttgtcttcagcagcacaggctgcaaagtttctgtcattgacatgcttccaaaacatttccgaagaagtaatttaaaagtaatatgttttattggagaaggggcgggcaacctcatgctaagagctgttttggaagttggtggaaatataaaattaatatatagatccttaaaagatcctgatgatcatcatgttcctgtagaatttctaagattaaaaccttgttatccttatattgatactggtggcagtttatctttggcttcaacagatgccaccaacaaggcccactgggattatttacatcttcactggacagatcctttaaatttaatagtatgtgatgcagaaataagtggtgtgaagcactggctaaaaattcttcacaggtggtatgagcacatgacttcctgcaagcactgtttaaaatcagaacatgataaatatttaataataaaatatcatgctcaagatgatttaatagatcttcctcatggtgtcaggctactaaaatgtaacatctgcctgggctccaaactaagtggcagtgagagctacctgctcattggtcttggtctttcaaataaacttcctgtctacagtgaagttcttcattcaaaacttcttttggcagaatgtcatcagtttcatcatccaaaatatttggatgtttctggaataaatacaaatataaaatccttaataccaatgttggattatccaataacttacaacaagatcaccactttgctagaaagtgtgcgggagctttcttcaaataaaaacaagaacaccatgtggattggaagaaatcctgtctaccataataaatggctaaagaggaaatatttcaacattttaaaatggctaaaatactgtatagaacttcctgccttcaggatggattataattcatttgagagaatagaaatgctttatccaaatttaagagatttggtagattctgtttctacttcagagctgaagaaagtaataaaagtaacaggcatcctcttcaggagcaacaccatgtgaattaatatgccaatgctaacatgtcatccccactactttttttgttcaatcactctcagtctagacatgtgagaagatcccaaacccaactgcacccctcccactcgaaatcagttgtagcctcagcagctccatctgccatgatctctgaccagcagcaaatgtattattattttaatttgtctatagttaacaaaaaattgatatctcacaggttgtaaacatagttcttttataattattgttagttaaactattgtgtttgacttcctttgggtatttttttcccgt

SEQ ID NO: 30 - DNA, 21748 bp, synthetic construct
  source 1..21748: mol_type = other DNA
acgcgaaaaaatgcataacaaaactatcaacctgaaaaaagttaggacaagtgaagattgctagtcccaaagaccagaatcatgggctgtaatgtgatgatggagcttgattatggtggacgagctgcatggctggcattccacataaccaactttgataggtcagatttggaaactatcctaagaggtgctagggtgtgcaatacatggcaagatcagagactctccgtgtaccttgtgggaagggattgcaatttgttaagaccatttgtgcaagctgccaaatttatccataatactaggagaggccaaacattaacacattggttcacaaaaaatatcgtgtttagttctacagggcaagagacagagcctcccattgaccccacatgtgagctgttggtagagctgatcagtggttaagatgacagcacattatgtagttaattaaaacaaagggtaggacaagtcctaatgtccacagctatgaacaagttcactcagaccatctctaaacctgccactatcttgaatatttcagacagtgaagagtcgggcgatgaggcaggggtgggcaaggtgtcccgtaccacacagagctcagagaggtggcttgatttgctcattgaaaagttccagccgagcctacaaaacatcactagatacatcaactggaacttcatcaggatctgcaatgataggcttaaaaaagaaaaaatggggtacattgaggccaagcaatatgtggaagacatggcttggatggtgatagcatctgaggcagacagcattgagtggaagtgcataaggaggcaggagaaagtgactggggtgaaatacccaaagttcttctttgtacaacacaaagaggactggattgagtgcacaggatgcattccgtacccaggccatgacttgatctatgatgaggatgatgatgactgagctgactcagatcactccaaccagcagagagatccatagttatagaaaaacattaggataaatacacatcctaggccgccaccatgttcgtgtttctggtgctgctgcctctggtgagctcccagtgcgtgaacctgaccacaaggacccagctgccccctgcctataccaattccttcacacggggcgtgtactatcccgacaaggtgtttagatctagcgtgctgcactccacacaggatctgtttctgcctttcttttctaacgtgacctggttccacgccatcagcggcaccaatggcacaaagcggttcgacaatccagtgctgccctttaacgatggcgtgtacttcgcctccaccgagaagtctaacatcatcagaggctggatctttggcaccacactggacagcaagacacagtccctgctgatcgtgaacaatgccaccaacgtggtcatcaaggtgtgcgagttccagttttgtaatgatccattcctggacgtgtactatcacaagaacaataagtcttggatggagagcgagtttcgcgtgtattcctctgccaacaattgcacatttgagtacgtgtcccagcccttcctgatggacctggagggcaagcagggcaatttcaagaacctgagggagttcgtgtttaagaatatcgatggctacttcaagatctactccaagcacaccccaatcaacctggggcgcgacctgccacagggcttctctgccctggagccactggtggatctgcccatcggcatcaacatcacccggtttcagacactgctggccctgcacagaagctacctgacaccaggcgacagctcctctggatggaccgcaggagctgccgcctactatgtgggctatctgcagcccaggaccttcctgctgaagtacaacgagaatggcaccatcacagacgccgtggattgcgccctggatcccctgtctgagaccaagtgtacactgaagagctttaccgtggagaagggcatctatcagacaagcaatttcagggtgcagcctaccgagtccatcgtgcgctttcccaatatcacaaacctgtgcccttttgacgaggtgttcaacgcaacccgcttcgccagcgtgtacgcctggaataggaagcgcatctccaactgcgtggccgactattctgtgctgtacaactttgctccattcttcgcctttaagtgctatggcgtgagccccacaaagctgaatgacctgtgctttaccaacgtgtacgccgattccttcgtgatcaggggcaacgaggtgagccagatcgcccctggccagacaggcaacatcgccgactacaattataagctgcctgacgatttcaccggctgcgtgatcgcctggaactctaacaagctggatagcaaagtgggcggcaactacaattatcggtaccggctgtttagaaagtctaatctgaagccattcgagagggacatctccacagagatctaccaggccggcaacaagccctgcaatggcgtggctggcgtgaactgttatttccctctgcagagctacggcttcaggccaacatacggcgtgggacatcagccctaccgcgtggtggtgctgtcttttgagctgctgcacgcacctgcaacagtgtgcggaccaaagaagagcaccaatctggtgaagaacaagtgcgtgaacttcaacttcaacggactgaccggcacaggcgtgctgaccgagtccaacaagaagttcctgccttttcagcagttcggcagggacatcgcagataccacagacgccgtgcgcgaccctcagaccctggagatcctggatatcacaccatgctccttcggcggcgtgtctgtgatcacaccaggcaccaatacaagcaaccaggtggccgtgctgtatcagggcgtgaattgtaccgaggtgcccgtggcaatccacgcagatcagctgacccctacatggcgggtgtactctaccggcagcaacgtgttccagacaagagccggatgcctgatcggagccgagtacgtgaacaatagctatgagtgcgacatccctatcggcgccggcatctgtgcctcctaccagacccagacaaagtcccacgggtctgcctcctctgtggccagccagtccatcatcgcctataccatgagcctgggcgccgagaattccgtggcctactccaacaattctatcgccatccctaccaacttcacaatctccgtgaccacagagatcctgccagtgagcatgaccaagacatccgtggactgcacaatgtatatctgtggcgattccaccgagtgctctaacctgctgctgcagtacggctctttttgtacccagctgaagagagccctgacaggcatcgccgtggagcaggacaagaacacacaggaggtgttcgcccaggtgaagcagatctacaagaccccacccatcaagtactttggcggcttcaacttcagccagatcctgcccgatcctagcaagccatccaagcggtcttttatcgaggacctgctgttcaacaaggtgaccctggccgatgccggcttcatcaagcagtatggcgattgcctgggcgacatcgccgccagagacctgatctgtgcccagaagtttaatggcctgaccgtgctgcctccactgctgacagatgagatgatcgcccagtacacatctgccctgctggccggcaccatcacaagcggatggaccttcggcgcaggagccgccctgcagatcccctttgccatgcagatggcctatcggttcaacggcatcggcgtgacccagaatgtgctgtacgagaaccagaagctgatcgccaatcagtttaactccgccatcggcaagatccaggactctctgagctccacagccagcgccctgggcaagctgcaggatgtggtgaatcacaacgcccaggccctgaataccctggtgaagcagctgtctagcaagttcggcgccatctcctctgtgctgaatgatatcctgagcaggctggaccctccagaggcagaggtgcagatcgaccggctgatcacaggcagactgcagtccctgcagacctacgtgacacagcagctgatcagggcagcagagatcagggcctctgccaatctggccgccaccaagatgagcgagtgcgtgctgggccagtccaagagagtggacttttgtggcaagggctatcacctgatgagcttcccacagtccgcccctcacggagtggtgtttctgcacgtgacctacgtgccagcccaggagaagaacttcaccacagcaccagcaatctgccacgatggcaaggcacactttcctagggagggcgtgttcgtgagcaacggcacccactggtttgtgacacagcgcaatttctacgagccacagatcatcaccacagacaatacattcgtgtccggcaactgtgacgtggtcatcggcatcgtgaacaataccgtgtatgatcctctgcagccagagctggactcttttaaggaggagctggataagtacttcaagaatcacaccagccccgacgtggatctgggcgacatctctggcatcaatgccagcgtggtgaacatccagaaggagatcgacaggctgaacgaggtggccaagaatctgaacgagtccctgatcgatctgcaggagctgggcaagtatgagcagtacatcaagtggccctggtatatctggctgggcttcatcgccggcctgatcgccatcgtgatggtgaccatcatgctgtgctgtatgacaagctgctgttcctgcctgaagggctgctgttcttgtggcagctgctgtaagtttgatgaggacgatagcgagcctgtgctgaagggcgtgaagctgcactacacctgatagccacctatagcaagtgatgtagtatttagtctatgattagttatagaaaaacattaggataaatacacatcctaggccgggccaaaatgtctctagacagattgaagctcaatgatgtctcaaacaaggatagcctgctgtccaactgcaaatacagtgttaccagatccacaggcgatgtaaccagtgtgtctggtcatgctatgcagaaagcccttgcaaggacactcggcatgttcttacttactgccttcaaccgttgcgaagaagtggcagaaatagggctccaatatgccatgtccttgctaggcagagatgatagcatcaagatattaagagaagccggctacaatgtaaaatgtgtggacacacagctcaaggactttacaatcaaattacaaggaaaggaatacaaaatacaagtcctagatatagtgggaatagatgcagccaatttagctgatctagagatacaagccagaggagtggtagcaaaagaactcaaaacaggagccaggctacctgacaatcggaggcatgatgcaccagattgtggtgtgatagttctctgtattgcagcattagttgtttccaaattagctgcaggggacaggggaggacttgatgctgtggaaagaagggctttaaatgtgctgaaagccgagaaagccaggtaccccaacatggaggtcaagcagatagctgaaagtttttatgatctgtttgaaaggaagccttattacattgatgtcttcatcacttttggcctggcccagtctagtgtcaagggaggcagcaaagttgaggggctgttttcaggtctcttcatgaatgcatacggggcaggacaagttatgctgaggtggggtttactggcaaaatctgtcaagaacatcatgctaggccatgctagtgtacaagctgagatggaacaggtggttgaggtttacgaatatgctcagaagcaaggaggggaggcaggattctatcacatcagaaataatccaaaagcttcacttctctctttgaccaattgtcctaatttcaccagtgttgtgcttggcaatgctgcaggtttaggcatcatagggtcatataagggtgctcctaggaatagagaactctttgatgctgccaaagattatgcagaaagattaaaggacaacaatgtaattaactacagtgcattaaacttgactgcagaagaaagagagctgatcagccagcagctgaacattgttgatgacactcctgatgatgatatttaattaaaactggaaaatgtaggataaatatggagaaattcgcccccgaatttgttggcgaggatgctaacaagaaggcagaggagtttctcaaacatagatccttcccttcggaaaaaccactagctggtataccgaacactgccactcatgtcaccaaatataacatgccccctatattgcgtagctcattcaaactcccttccccgagagttgctgcaaatcttactgaaccctctgctccccctaccactccaccacccacacctccccagaacaaggaagagcagcccaaagagtctgatgttgacattgagactatgcatgtctgtaaggttcctgacaatccggaacacagcaagaagccatgctgctcagatgataccgatactaagaaaactaggaagccgatggtcacctttgtggaacccgaggagaaatttgtcggattgggagctagcttgtacagggagaccatgcagacctttgctgctgatggttatgatgaagaaagcaacctatcgtttgaggagactaaccaagagccgggttcttcatctgtagaacaaagactagatagaatagaggagaaattgtcctacataataggccttttaaacaccataatggtagcgactgctggacctaccactgctagagatgagattagagatgcccttataggcactagagaagaacttattgagatgatcaagtctgacatcttgactgtcaatgacagaatagtggccatggagaagctcagagatgaggaatgctccagagctgacactgatgatggatcagcctgttatttaacagacagagcaaggatactagataagatagtgtccagcaatgctgaagaggctaaggaagatttggatgttgatgacatcatgggcattaatttttagttaattaaaataacaacaggacaaataatggaggcctacttggtagagatgtaccatggtgtcccatatacagctgcagtacagctaaacttggttgaaaaacattcagccaacatatcactaactgtgtggataccgatgtttcaaacatctctaccaaagaactccgttatggacctgctacatgatgttacagtcatttgtacacagatatcaacagtgcatggtcccatgatcaaggtagatctgagctcttccaatgcaggtttagctaccatgccaaggcaattcttgataaatgctatcatagctttggatgactggggcaacatggattacgaagtgcctgttgcttttgataaaaagagcttctgtgtgacaattcttaagcctaaaaacatgctttacactgtacccagcattactcccactaatcgacctactcatgagctgatagctgtctgctctttccataacagggtaacattaaagtcattcaatatacctgtcttcatcagagcactgtctatcagacagcaggaccttgatagtgtggagcaggctataagctccgatgtggaccatgctataacaacagctagggtggctccctatgcagggcttacacttgtgatcaacatcacatccaccaaaggagcattcaaactgctaaaggcaggtagtcagattcttgcagaactgggtccctatctgacgcaggtgagcctacatgatgtgattatgaactggaaacatacaggcacttcctacatactcaagagctcctcaacaagtggatgaaaaagagaaagtcaccattgatcagctcaatccacaactacaaccccacgatttcacacagcacaacaaccaccgccaccaacatccacatgacaaccacacatacacacccacatacatatatacacatatcttagttaaataaaatcaggataaataatggatcctaacatgacctcacaccagatcaccctcgagatcaacatgaccagcagccgtattggcacatacactacaccagccccaacagctcttctccttgcatgtgccgtcatcaacacagtgtgtgcgctgataatggcctgcagcagtagaagcactgccacatcaggcattgtcagcagccaatgcacagttcatcccaatcaccctccaccaagttatggcgtcaatgtaactggtctgccgggtaacctatactcaaggaacactacataacattataaataacagaaattatccttcaataaaccccaggccagacagctttaccctgctagacgattcaatcagcccttgcagtatgtcgtctagttaacaaaaaaccggtaggataagtactatcctattggaaccaaacgagacctgtagagcagctcacacaagagaaccacaagctgacttcacctagtatgggaaggaacttagaagtgagtggcagcattaccaatttgaactttgagagaactcagcatcctgacacatttaggactgttgtaaaagtgaaccaaatgtgtaagcttattgcaggtgtgctcacaagtgctgctgtggcagtttgtgtgggggtcataatgtattctgttttcacatcaaaccacaaggccaactccacgcagaatgccacgacccggaacagcacatccacccctccccaaccaaccgccggtctgcccaccacagagcaagggaccatccccagattcaccaaaccccccaccaaaaccgccacccaccatgagatcacagagcccgtcaaaatggcaacaccttcagaggatccctaccaatgctccagcaatggttatttggaccgacctgatttacctgaaaatttcaaactcgtattggatgttatatgcaagcctccaggtcctgaacatcacaacaccagctgttatgagaaacgtgaaatcaacccaggaagtgtttgccctgatcttgtaacaatgaaggcaaacatgggcttaaacaatggtggtggggaggatgctgcaccttatatagaggttaccaccctttctacgtactccaacaaaagggcaatgtgtgtccacaatgggtgtgatcaaggcttctgtttcttcctttctggtttaagcactgatcaggagagagctgtgctagagcttggaggtcaacaggctatcatggagttgcattatgattcctactggaaacactattggagtaactctaattgtgttgttcccagaacaaactgcaacctgacagaccaaactgagattttgtttcctaggtttaacaacaagaatcagtctcagtgtaccacctgtgcagattcagctggcctagataacaaattttatctcacatgtgatgggcttttaagaaccctccctctagttggactacccagcctaagtcctcaggcttacaaagctgtacccacacaaactacaggcaccaccacggcaccaacatcagagacgaggcacccaacccctgcacccaggaggtccaaacctctcagtcggaagaagagagctttatgtggtgtagactcaagcagagaacccaaaccaacaatgccttactggtgtcctatgctccaattatttccaaggaggtctaattcttaagtgacctattcctgaattaacttcagaataagtaccaaccttatcagtagttaatgaaaactaagctttgatataataggacaaatatgattcctggcaggatctttctagtccttctggtgatcttcaacaccaagccaattcacccaaatacattaacagaaaaattctatgagtccacatgtagtgttgagactgcaggttataagagtgcccttagaacaggttggcatatgacagttatgtcaattaagttgtctcaaataaatattgagtcatgcaagagcagcaactcgttattggctcatgagcttgcaatctatagtagtgcagtggatgaattgagaacgttatcatccaatgccttgaagtccaaaaggaagaagaggttcctcggtttgattcttggtctcggagctgcagtcactgccggggtggctttagccaagacagtgcaacttgaaagtgagattgcattgattagagatgcagtgagaaatacaaatgaggctgttgttagcctaaccaacggcatgtcagtgttggctaaagtggtggatgatttgaaaaacttcatatctaaagaattactcccaaaaataaaccgagtctcttgtgatgtgcacgacatcactgccgtcattagattccaacagctcaacaaaagacttttggaagtatctcgtgaattttcatctaatgcaggattaacacacactgtttcatcttttatgttaacagaccgggaactcacctccattgtaggcggcatggctgtttcagcaggccaaaaagagataatgctatctagcaaagctataatgagaagaaatgggttagcaatattaagttcagtcaacgctgacacactggtttatgtaatacaactcccattatttggtgttatggacacagattgttgggtaataagaagttctatagactgtcataacatagcagacaagtatgcttgtttggctagagctgataatggctggtattgtcacaatgctggctcattatcatacttcccgtcgccaacggattgtgagatccacaatgggtatgctttctgtgacactctaaaaagtctaactgtacctgtaacatcacgagaatgcaactcaaacatgtataccactaactacgattgtaagatttccacaagtaaaacttatgtgagtacagcggtactgactacaatgggttgcttggtatcttgttatggtcataacagttgcacagtcatcaataatgacaaaggtataataaggactctgccagatggttgccactacatctccaacaaaggtgtggacagggttcaagtaggtaacactgtttactatcttagcaaagaagttggcaagtcaattgttgtcagaggggaaccattggtcttgaaatatgaccctttgagtttccctgacgataaatttgatgttgctataagagatgtggagcatagcatcaatcagacacgcacattcttgaaggcctctgatcagttattggacttaagtgaaaacagagagaataaaaatttaaacaagtcatatatactaacaactctgctcttcgttgtaatgcttattataataatggctgtcatagggttcattctgtataaggtattgaaaatgatcagagacaacaagttgaaatccaaaagtacacctggcctcacagttttatcatgacaattgtaccaaaccataattgagttagttaattaaaaacttaggataagtgacaatccagacccaacacctctttcaactctcaaggataaggtaggatgagtgtgagaccttgcaaatttgaggttcaagggttttgttccagagggaggaattgcaagtatagtcataaatattgggaatggcctttgaaaactcttatgctcaggcagaactacatgcttaataggatttataggttcctcgacaccaacacagatgcaatgtcagatgtcagcggatttgatgcaccacaaaggactgctgagtatgccttgggaaccataggtgtgctgaaaagttacctggaaaaaactaacaacatcactaaatcaatagcttgtggcagtttgatcactgtattgcagaacttggatgttggtctagtaatacaagcaagagatagcaacactgaggacaccaattacttgagaagttgcaacactatactgtcttatatagacaagatacacaagaagagacaaattattcacattctcaaaagactgccagtaggagtactatgcaatctgatccaatctgtcatctccatcgaggagaagataaattcttctatgaaaacagaatgataaggctgcctaaatactatccagccatactgcataagatgtatattattagagtaaatagaaacctcacttacgatgggtctggaccatccacaataatagatgcaggaaagtctgtggtgtggaatcgtgttgatgtgatagcttgtgtgaaagaggccttgtgctgcatagaattcagctggaataaccaagtgatcatagactttgattatagccaggccagatgatgtggactgtattcctttttttgtcagtaatcagttattaacccaaaattgttaattatgtagactttaagttaactaacttcatgttaattcaatagttatataaaaaaatattcgaattaggatcaatatggatcctattgatgaacaagaagttaatgtgtacttgccggatagctacttaaagggtgttatatcttttagtgaaactaatgctcttggcagctgtatcattggtagacctttcttgaaggatgactttactgccactacttcaatccgtaaccccctaattgaacataaaagaataagggacactaaattagtaaaaaatattgtttcaaaccctcaatataggttagtggagcctctccaaatgcagcatgagctcttgagtgtactatcgcccaatttcatattgcacactgccaacttaaggaaaattatacaaagaagtgttgacataacagataaaaagttgaaccccattttgcacattttgaatcttaattctcctaaccaagagggtaaggtgtcggaacggctaactaggctaattaagaaacatctctctcacatacctaattgggtaagcagctggtacaatatatgggtcaatcttaacaacttactgcaggagtaccgttcaaaggaagttatagaccataactgtgttctgactaggcaattgtctggaagtttcatacatgtggtcatgagtcaatatggagttgtgataattagcaaaaaaagtaaaagatatacaatgtgtacttataaccaattcctaacctggaaggaccttgccttgagcagatttaatgccaattatgtggtctggctaagtaatgtgttaaacacactcaacgaggggttgggattaaggtgtagattaaaaggtcatctgctcagtaagttgtacatttccactgacatctttttatcttcaacatctaatgaattttataatgtggtcaaggaatttgagggcttcatcatgtcactgatattgaaacaaactgaggaagccttatttagcacaaggttttataataacatgttgaacaacttaattgatgccattgatagggctcgactagagtatctggcccgctgtgccaattcagctgccaggattaatttacctagtacagatgttatgatagcatcattgggtgatatcttatctttgataaacgttttaggtgaatccaaccttaacaacttaagtgagttatattttatcttcaggatatttggtcaccctatggttgatgagaggaaggccatggatgcagtcagagataactgttgtgaaacaaagtttctgacggctaagaaccttgcatcgttaagaggagcatatgtttatagaattatcaaaggattcgtagcaaattataacaggtggccttacataaaaactagagtttgccttacaccaacatggattaactatcttgacaccaattcatgtccctcattattagagatgacagaagatgattttattgtgttagctggagtgcactttataagagaattccacatcccaaagctaactgatctggagattatattaaatgacaaggccatatctcctccaaaatcactcatttggtcatgctttccaaaaaactacatacctcaggttatacaagatgagtatgcccggaggtattgtagagctaaagcacctttgaagacaagacgtgtcttggagttctacttacaggacaaggatttcaagttggatcagctccatagagtagtagtgaaccaggactaccttaatgataaagaacatataatttctttaacaggaaaagaaagagagttgggtgttggtaggatgtttgccatgcaacctgggaagcagaggcaagtccaaattttagcagagaagctgttggctgataacatcctgcaattctttccggagacactgactagatacggtgatttggagctgcaaaagatactagagttaaaagctggactttcaaataaaaatgacagatctaaagactcctacaataattatataagtaggtgctcattaattactgatttaagtaaatttaaccaagcttttaggtacgagtcatcctgtgtgtgtagtgatcttttagatgagctacatgggactcaaagcttattctcttggctgcatttaacagtaccactgactactataatgtgtacatataggcatgcgccgccggacactggaaacaactataatgtagatgatattgctgagcagagtggactctaccgctaccacatgggcgggattgagggctggtgccagaagctctggacaacagaggccattgctttgctagatactgtagctgtgaagggccgtttccagctaacttcattaataaatggcgacaaccaaagtattgatatttcaaaaccaacaaggctggggaccaggactcaaagtgaagcagattatgatttggcaataaattctttaagattaatatcagcagcttataaaggcattggacataaattaaaagaaggtgagacctacttgtcacgtgacatgcagttcatgagtaaaacaatacaacatgaaggggtctactacccggcctccatcaagaaaatattaagagttggtccctggatcaacacaatattagatgatataaaaacttcaacagaaagtattggttctctaactcaagaactagaatataaaggtgaaagtttaatgagcagcctgctgctgaggaacttctggctctacagattatattcagtggatttaaaagatcattctttgtgtggaaagcagctctacagatccttaataaaagtgttaaaacatttgaagaggtgcttcaacctggagaaccttggggaatgtttggaattatttttaaatgtgcccatgcagtttggaggtgctgacccaaatgtcatctacaggagcttctacagaagaactccagattttctaacagaaagtataactcatctcatcctcattttaaaacattttagaagagatttggaattcaacaaagataatgtctccaaagctgttctttctttgctagagttcaccaagaatgattctgcagaatttgtaactttgatgagagatcctcaagcaattggtagtgagaggcaggccaagatcacttcagacatcaacagaacagctgtaacttcagtgttatcaaatgctccaaatgaaatatttagaacttcagctcttcattacagcagcacagaaaatgaattaaatggaatagcaagtggagtttctcctgtttatcctcatggtcttcgagttttatatgaaagtttacctttttataaagcagagaagattgtcaacatggtttctgggaccaagtccatcaccaacatactggagaagacatcagccatctcctacacagatataattcgagccaccaacatgatggtggagaacctcactttgctaacaagaataatgaaaccaggtgctgacacatctttggatcctgacacaatagtaataacaatattatcaaaaataataagagataaatcctgggatgttggtgatataattggtgtcacttccccatctcctgtctcctgcttcaaggtggtctacacatcaactctacaaaataattcagtagtaatagaaagatacacaacagacacctacacaagaggtaagagaggccccaccaagccctgggtgggcagcagcacacaggagaagaagtccatgcctgtctacaacagacaagttttaacaagaggacaaagagatcaaatagaaaatatagcaaagctggagtgggtgttttcttcagtagcaaatattgattctttgctaaatgagctcagcaccatgactttgggtctttctctaaggaaatgtagacaactttttccaacatatttaagtttaaacttcctgcacaggctttctgtcagcagcaggcccagagaatatccttcttctcttcctgcctacaggacaacaaattttcattttgatactggaccaataaataaagtgttaacagaaagatttggagatgaagatataaatttggtatttcaaaatgcaatatcatatggtctttccaccatgtctttggtggagcagtttactggtgtctgtccaaataaagttttgctggtgcccaagctacaagaaatacaactaatgaaagttccaatatttcaaggtggcttcaacctacaaagtataattccaataataaggcagcagcacatgttcctgcccaaccacatcactccagcccagtatattgaattatttctttcttcaaaacaatttcattcaagaataaatttaaaacacaacaacagatttaaacttgttttacaaaaagattattttaatggggagaacatgatagaaactttgtccacctgtttggcaggccactggatcatcattttgatgctaatgaaggagagtcaggggatatttgacaaggagtggtatgatggttttgtaacagaccacatgttcctggacctgcagctcttcctctcctccttcaagacatttctaactgtcttcaactttgcttatttaaaagttggttcaaatatagaagaaataacaggaaatcaagccaacctgctggagctgctggacctgggctactggaagaacatgtataaagtattttcagagaccaaggtgcggctggctttgctaaaacaagatttatcatttaattctgtgaagaacagcagcagcttccggcactggtttataaattctctacaagaagtacaatgtacttctgtgccttgggtggtaaatgtaacaagaaatccaactcatttaaaaggtgttctacagtacatgaagatgatagaaagtggcatgattcaaggttattcagcaaatatttcttcagttttaagtatcccatataattatccagacatggcgcacatgatgacaaaaataataagaaatcgaggccacatgtcctatgattatccaaagatgaagaaaagtttaactttctccatgacagacatgagtgacagctacatgctcaacctcttccccaaagtagaatgttcttacatgagtggttatttggataaactagatgatactctacaacttctaaagaaacctcctgttggaagaaaagttccttctgtggctttgccctggcaccactgcaacagatacaactttgtcttcagcagcacaggctgcaaagtttctgtcattgacatgcttccaaaacatttccgaagaagtaatttaaaagtaatatgttttattggagaaggggcgggcaacctcatgctaagagctgttttggaagttggtggaaatataaaattaatatatagatccttaaaagatcctgatgatcatcatgttcctgtagaatttctaagattaaaaccttgttatccttatattgatactggtggcagtttatctttggcttcaacagatgccaccaacaaggcccactgggattatttacatcttcactggacagatcctttaaatttaatagtatgtgatgcagaaataagtggtgtgaagcactggctaaaaattcttcacaggtggtatgagcacatgacttcctgcaagcactgtttaaaatcagaacatgataaatatttaataataaaatatcatgctcaagatgatttaatagatcttcctcatggtgtcaggctactaaaatgtaacatctgcctgggctccaaactaagtggcagtgagagctacctgctcattggtcttggtctttcaaataaacttcctgtctacagtgaagttcttcattcaaaacttcttttggcagaatgtcatcagtttcatcatccaaaatatttggatgtttctggaataaatacaaatataaaatccttaataccaatgttggattatccaataacttacaacaagatcaccactttgctagaaagtgtgcgggagctttcttcaaataaaaacaagaacaccatgtggattggaagaaatcctgtctaccataataaatggctaaagaggaaatatttcaacattttaaaatggctaaaatactgtatagaacttcctgccttcaggatggattataattcatttgagagaatagaaatgctttatccaaatttaagagatttggtagattctgtttctacttcagagctgaagaaagtaataaaagtaacaggcatcctcttcaggagcaacaccatgtgaattaatatgccaatgctaacatgtcatccccactactttttttgttcaatcactctcagtctagacatgtgagaagatcccaaacccaactgcacccctcccactcgaaatcagttgtagcctcagcagctccatctgccatgatctctgaccagcagcaaatgtattattattttaatttgtctatagttaacaaaaaattgatatctcacaggttgtaaacatagttcttttataattattgttagttaaactattgtgtttgacttcctttgggtatttttttcccgtgggtcggcatggcatctccacctcctcgcggtccgacctgggcatccgaaggaggacgcacgtccactcggatggctaagggagagcctgcagtagcataaccccttggggcctctaaacgggtcttgaggggttttttgctgaaaggaggaactatatacgcgtcgacgggcccgcgctcactggccgtcgttttacaacgtcgtgactgggaaaaccctggcgttacccaacttaatcgccttgcagcacatccccctttcgccagctggcgtaatagcgaagaggcccgcaccgatcgcccttcccaacagttgcgcagcctgaatggcgaatgggacgcgccctgtagcggcgcattaagcgcggcgggtgtggtggttacgcgcagcgtgaccgctacacttgccagcgccctagcgcccgctcctttcgctttcttcccttcctttctcgccacgttcgccggctttccccgtcaagctctaaatcgggggctccctttagggttccgatttagtgctttacggcacctcgaccccaaaaaacttgattagggtgatggttcacgtagtgggccatcgccctgatagacggtttttcgccctttgacgttggagtccacgttctttaatagtggactcttgttccaaactggaacaacactcaaccctatctcggtctattcttttgatttataagggattttgccgatttcggcctattggttaaaaaatgagctgatttaacaaaaatttaacgcgaattttaacaaaatattaacgcttacaatttaggtggcacttttcggggaaatgtgcgcggaacccctatttgtttatttttctaaatacattcaaatatgtatccgctcatgagacaataaccctgataaatgcttcaataatattgaaaaaggaagagtatgagtattcaacatttccgtgtcgcccttattcccttttttgcggcattttgccttcctgtttttgctcacccagaaacgctggtgaaagtaaaagatgctgaagatcagttgggtgcacgagtgggttacatcgaactggatctcaacagcggtaagatccttgagagttttcgccccgaagaacgttttccaatgatgagcacttttaaagttctgctatgtggcgcggtattatcccgtattgacgccgggcaagagcaactcggtcgccgcatacactattctcagaatgacttggttgagtactcaccagtcacagaaaagcatcttacggatggcatgacagtaagagaattatgcagtgctgccataaccatgagtgataacactgcggccaacttacttctgacaacgatcggaggaccgaaggagctaaccgcttttttgcacaacatgggggatcatgtaactcgccttgatcgttgggaaccggagctgaatgaagccataccaaacgacgagcgtgacaccacgatgcctgtagcaatggcaacaacgttgcgcaaactattaactggcgaactacttactctagcttcccggcaacaattaatagactggatggaggcggataaagttgcaggaccacttctgcgctcggcccttccggctggctggtttattgctgataaatctggagccggtgagcgtgggtctcgcggtatcattgcagcactggggccagatggtaagccctcccgtatcgtagttatctacacgacggggagtcaggcaactatggatgaacgaaatagacagatcgctgagataggtgcctcactgattaagcattggtaactgtcagaccaagtttactcatatatactttagattgatttaaaacttcatttttaatttaaaaggatctaggtgaagatcctttttgataatctcatgaccaaaatcccttaacgtgagttttcgttccactgagcgtcagaccccgtagaaaagatcaaaggatcttcttgagatcctttttttctgcgcgtaatctgctgcttgcaaacaaaaaaaccaccgctaccagcggtggtttgtttgccggatcaagagctaccaactctttttccgaaggtaactggcttcagcagagcgcagataccaaatactgtccttctagtgtagccgtagttaggccaccacttcaagaactctgtagcaccgcctacatacctcgctctgctaatcctgttaccagtggctgctgccagtggcgataagtcgtgtcttaccgggttggactcaagacgatagttaccggataaggcgcagcggtcgggctgaacggggggttcgtgcacacagcccagcttggagcgaacgacctacaccgaactgagatacctacagcgtgagctatgagaaagcgccacgcttcccgaagggagaaaggcggacaggtatccggtaagcggcagggtcggaacaggagagcgcacgagggagcttccagggggaaacgcctggtatctttatagtcctgtcgggtttcgccacctctgacttgagcgtcgatttttgtgatgctcgtcaggggggcggagcctatggaaaaacgccagcaacgcggcctttttacggttcctggccttttgctggccttttgctcacatgttctttcctgcgttatcccctgattctgtggataaccgtattaccgcctttgagtgagctgataccgctcgccgcagccgaacgaccgagcgcagcgagtcagtgagcgaggaagcggaagagcgcccaatacgcaaaccgcctctccccgcgcgttggccgattcattaatgcagctggcacgacaggtttcccgactggaaagcgggcagtgagcgcaacgcaattaatgtgagttagctcactcattaggcaccccaggctttacactttatgcttccggctcgtatgttgtgtggaattgtgagcggataacaatttcacacaggaaacagctatgaccatgattacgccaagcgcgcccgggtaatacgactcactataggg

SEQ ID NO: 31 - DNA, 18762 bp, synthetic construct
  source 1..18762: mol_type = other DNA
acgcgaaaaaatgcataacaaaactatcaacctgaaaaaagttaggacaagtgaagattgctagtcccaaagaccagaatcatgggctgtaatgtgatgatggagcttgattatggtggacgagctgcatggctggcattccacataaccaactttgataggtcagatttggaaactatcctaagaggtgctagggtgtgcaatacatggcaagatcagagactctccgtgtaccttgtgggaagggattgcaatttgttaagaccatttgtgcaagctgccaaatttatccataatactaggagaggccaaacattaacacattggttcacaaaaaatatcgtgtttagttctacagggcaagagacagagcctcccattgaccccacatgtgagctgttggtagagctgatcagtggttaagatgacagcacattatgtagttaattaaaacaaagggtaggacaagtcctaatgtccacagctatgaacaagttcactcagaccatctctaaacctgccactatcttgaatatttcagacagtgaagagtcgggcgatgaggcaggggtgggcaaggtgtcccgtaccacacagagctcagagaggtggcttgatttgctcattgaaaagttccagccgagcctacaaaacatcactagatacatcaactggaacttcatcaggatctgcaatgataggcttaaaaaagaaaaaatggggtacattgaggccaagcaatatgtggaagacatggcttggatggtgatagcatctgaggcagacagcattgagtggaagtgcataaggaggcaggagaaagtgactggggtgaaatacccaaagttcttctttgtacaacacaaagaggactggattgagtgcacaggatgcattccgtacccaggccatgacttgatctatgatgaggatgatgatgactgagctgactcagatcactccaaccagcagagagatccatagttatagaaaaacattaggataaatacacatcctaggccgccaccatgttcgtgtttctggtgctgctgcctctggtgagctcccagtgcgtgaacctgaccacaaggacccagctgccccctgcctataccaattccttcacacggggcgtgtactatcccgacaaggtgtttagatctagcgtgctgcactccacacaggatctgtttctgcctttcttttctaacgtgacctggttccacgccatccacgtgagcggcaccaatggcacaaagcggttcgacaatccagtgctgccctttaacgatggcgtgtacttcgcctccaccgagaagtctaacatcatcagaggctggatctttggcaccacactggacagcaagacacagtccctgctgatcgtgaacaatgccaccaacgtggtcatcaaggtgtgcgagttccagttttgtaatgatccattcctgggcgtgtactatcacaagaacaataagtcttggatggagagcgagtttcgcgtgtattcctctgccaacaattgcacatttgagtacgtgtcccagcccttcctgatggacctggagggcaagcagggcaatttcaagaacctgagggagttcgtgtttaagaatatcgatggctacttcaagatctactccaagcacaccccaatcaacctggtgcgcgacctgccacagggcttctctgccctggagccactggtggatctgcccatcggcatcaacatcacccggtttcagacactgctggccctgcacagaagctacctgacaccaggcgacagctcctctggatggaccgcaggagctgccgcctactatgtgggctatctgcagcccaggaccttcctgctgaagtacaacgagaatggcaccatcacagacgccgtggattgcgccctggatcccctgtctgagaccaagtgtacactgaagagctttaccgtggagaagggcatctatcagacaagcaatttcagggtgcagcctaccgagtccatcgtgcgctttcccaatatcacaaacctgtgcccttttggcgaggtgttcaacgcaacccgcttcgccagcgtgtacgcctggaataggaagcgcatctccaactgcgtggccgactattctgtgctgtacaacagcgcctccttctctacctttaagtgctatggcgtgagccccacaaagctgaatgacctgtgctttaccaacgtgtacgccgattccttcgtgatcaggggcgacgaggtgcgccagatcgcccctggccagacaggcaagatcgccgactacaattataagctgcctgacgatttcaccggctgcgtgatcgcctggaactctaacaatctggatagcaaagtgggcggcaactacaattatctgtaccggctgtttagaaagtctaatctgaagccattcgagagggacatctccacagagatctaccaggccggctctaccccctgcaatggcgtggagggctttaactgttatttccctctgcagagctacggcttccagccaacaaacggcgtgggctatcagccctaccgcgtggtggtgctgtcttttgagctgctgcacgcacctgcaacagtgtgcggaccaaagaagagcaccaatctggtgaagaacaagtgcgtgaacttcaacttcaacggactgaccggcacaggcgtgctgaccgagtccaacaagaagttcctgccttttcagcagttcggcagggacatcgcagataccacagacgccgtgcgcgaccctcagaccctggagatcctggatatcacaccatgctccttcggcggcgtgtctgtgatcacaccaggcaccaatacaagcaaccaggtggccgtgctgtatcaggacgtgaattgtaccgaggtgcccgtggcaatccacgcagatcagctgacccctacatggcgggtgtactctaccggcagcaacgtgttccagacaagagccggatgcctgatcggagccgagcacgtgaacaatagctatgagtgcgacatccctatcggcgccggcatctgtgcctcctaccagacccagacaaactccccagggtctgcctcctctgtggccagccagtccatcatcgcctataccatgagcctgggcgccgagaattccgtggcctactccaacaattctatcgccatccctaccaacttcacaatctccgtgaccacagagatcctgccagtgagcatgaccaagacatccgtggactgcacaatgtatatctgtggcgattccaccgagtgctctaacctgctgctgcagtacggctctttttgtacccagctgaatagagccctgacaggcatcgccgtggagcaggacaagaacacacaggaggtgttcgcccaggtgaagcagatctacaagaccccacccatcaaggactttggcggcttcaacttcagccagatcctgcccgatcctagcaagccatccaagcggtctcctatcgaggacctgctgttcaacaaggtgaccctggccgatgccggcttcatcaagcagtatggcgattgcctgggcgacatcgccgccagagacctgatctgtgcccagaagtttaatggcctgaccgtgctgcctccactgctgacagatgagatgatcgcccagtacacatctgccctgctggccggcaccatcacaagcggatggaccttcggcgcaggacccgccctgcagatcccctttcccatgcagatggcctatcggttcaacggcatcggcgtgacccagaatgtgctgtacgagaaccagaagctgatcgccaatcagtttaactccgccatcggcaagatccaggactctctgagctccacacccagcgccctgggcaagctgcaggatgtggtgaatcagaacgcccaggccctgaataccctggtgaagcagctgtctagcaacttcggcgccatctcctctgtgctgaatgatatcctgagcaggctggaccctccagaggcagaggtgcagatcgaccggctgatcacaggcagactgcagtccctgcagacctacgtgacacagcagctgatcagggcagcagagatcagggcctctgccaatctggccgccaccaagatgagcgagtgcgtgctgggccagtccaagagagtggacttttgtggcaagggctatcacctgatgagcttcccacagtccgcccctcacggagtggtgtttctgcacgtgacctacgtgccagcccaggagaagaacttcaccacagcaccagcaatctgccacgatggcaaggcacactttcctagggagggcgtgttcgtgagcaacggcacccactggtttgtgacacagcgcaatttctacgagccacagatcatcaccacagacaatacattcgtgtccggcaactgtgacgtggtcatcggcatcgtgaacaataccgtgtatgatcctctgcagccagagctggactcttttaaggaggagctggataagtacttcaagaatcacaccagccccgacgtggatctgggcgacatctctggcatcaatgccagcgtggtgaacatccagaaggagatcgacaggctgaacgaggtggccaagaatctgaacgagtccctgatcgatctgcaggagctgggcaagtatgagcagtacatcaagtggccctggtatatctggctgggcttcatcgccggcctgatcgccatcgtgatggtgaccatcatgctgtgctgtatgacaagctgctgttcctgcctgaagggctgctgttcttgtggcagctgctgtaagtttgatgaggacgatagcgagcctgtgctgaagggcgtgaagctgcactacacctgatagccacctatagcaagtgatgtagtatttagtctatgattagttatagaaaaacattaggataaatacacatcctaggccgggccaaaatgtctctagacagattgaagctcaatgatgtctcaaacaaggatagcctgctgtccaactgcaaatacagtgttaccagatccacaggcgatgtaaccagtgtgtctggtcatgctatgcagaaagcccttgcaaggacactcggcatgttcttacttactgccttcaaccgttgcgaagaagtggcagaaatagggctccaatatgccatgtccttgctaggcagagatgatagcatcaagatattaagagaagccggctacaatgtaaaatgtgtggacacacagctcaaggactttacaatcaaattacaaggaaaggaatacaaaatacaagtcctagatatagtgggaatagatgcagccaatttagctgatctagagatacaagccagaggagtggtagcaaaagaactcaaaacaggagccaggctacctgacaatcggaggcatgatgcaccagattgtggtgtgatagttctctgtattgcagcattagttgtttccaaattagctgcaggggacaggggaggacttgatgctgtggaaagaagggctttaaatgtgctgaaagccgagaaagccaggtaccccaacatggaggtcaagcagatagctgaaagtttttatgatctgtttgaaaggaagccttattacattgatgtcttcatcacttttggcctggcccagtctagtgtcaagggaggcagcaaagttgaggggctgttttcaggtctcttcatgaatgcatacggggcaggacaagttatgctgaggtggggtttactggcaaaatctgtcaagaacatcatgctaggccatgctagtgtacaagctgagatggaacaggtggttgaggtttacgaatatgctcagaagcaaggaggggaggcaggattctatcacatcagaaataatccaaaagcttcacttctctctttgaccaattgtcctaatttcaccagtgttgtgcttggcaatgctgcaggtttaggcatcatagggtcatataagggtgctcctaggaatagagaactctttgatgctgccaaagattatgcagaaagattaaaggacaacaatgtaattaactacagtgcattaaacttgactgcagaagaaagagagctgatcagccagcagctgaacattgttgatgacactcctgatgatgatatttaattaaaactggaaaatgtaggataaatatggagaaattcgcccccgaatttgttggcgaggatgctaacaagaaggcagaggagtttctcaaacatagatccttcccttcggaaaaaccactagctggtataccgaacactgccactcatgtcaccaaatataacatgccccctatattgcgtagctcattcaaactcccttccccgagagttgctgcaaatcttactgaaccctctgctccccctaccactccaccacccacacctccccagaacaaggaagagcagcccaaagagtctgatgttgacattgagactatgcatgtctgtaaggttcctgacaatccggaacacagcaagaagccatgctgctcagatgataccgatactaagaaaactaggaagccgatggtcacctttgtggaacccgaggagaaatttgtcggattgggagctagcttgtacagggagaccatgcagacctttgctgctgatggttatgatgaagaaagcaacctatcgtttgaggagactaaccaagagccgggttcttcatctgtagaacaaagactagatagaatagaggagaaattgtcctacataataggccttttaaacaccataatggtagcgactgctggacctaccactgctagagatgagattagagatgcccttataggcactagagaagaacttattgagatgatcaagtctgacatcttgactgtcaatgacagaatagtggccatggagaagctcagagatgaggaatgctccagagctgacactgatgatggatcagcctgttatttaacagacagagcaaggatactagataagatagtgtccagcaatgctgaagaggctaaggaagatttggatgttgatgacatcatgggcattaatttttagttaattaaaataacaacaggacaaataatggaggcctacttggtagagatgtaccatggtgtcccatatacagctgcagtacagctaaacttggttgaaaaacattcagccaacatatcactaactgtgtggataccgatgtttcaaacatctctaccaaagaactccgttatggacctgctacatgatgttacagtcatttgtacacagatatcaacagtgcatggtcccatgatcaaggtagatctgagctcttccaatgcaggtttagctaccatgccaaggcaattcttgataaatgctatcatagctttggatgactggggcaacatggattacgaagtgcctgttgcttttgataaaaagagcttctgtgtgacaattcttaagcctaaaaacatgctttacactgtacccagcattactcccactaatcgacctactcatgagctgatagctgtctgctctttccataacagggtaacattaaagtcattcaatatacctgtcttcatcagagcactgtctatcagacagcaggaccttgatagtgtggagcaggctataagctccgatgtggaccatgctataacaacagctagggtggctccctatgcagggcttacacttgtgatcaacatcacatccaccaaaggagcattcaaactgctaaaggcaggtagtcagattcttgcagaactgggtccctatctgacgcaggtgagcctacatgatgtgattatgaactggaaacatacaggcacttcctacatactcaagagctcctcaacaagtggatgaaaaagagaaagtcaccattgatcagctcaatccacaactacaaccccacgatttcacacagcacaacaaccaccgccaccaacatccacatgacaaccacacatacacacccacatacatatatacacatatcttagttaaataaaatcaggataaataatggatcctaacatgacctcacaccagatcaccctcgagatcaacatgaccagcagccgtattggcacatacactacaccagccccaacagctcttctccttgcatgtgccgtcatcaacacagtgtgtgcgctgataatggcctgcagcagtagaagcactgccacatcaggcattgtcagcagccaatgcacagttcatcccaatcaccctccaccaagttatggcgtcaatgtaactggtctgccgggtaacctatactcaaggaacactacataacattataaataacagaaattatccttcaataaaccccaggccagacagctttaccctgctagacgattcaatcagcccttgcagtatgtcgtctagttaacaaaaaaccggtaggataagtactatcctattggaaccaaacgagacctgtagagcagctcacacaagagaaccacaagctgacttcacctagtatgggaaggaacttagaagtgagtggcagcattaccaatttgaactttgagagaactcagcatcctgacacatttaggactgttgtaaaagtgaaccaaatgtgtaagcttattgcaggtgtgctcacaagtgctgctgtggcagtttgtgtgggggtcataatgtattctgttttcacatcaaaccacaaggccaactccacgcagaatgccacgacccggaacagcacatccacccctccccaaccaaccgccggtctgcccaccacagagcaagggaccatccccagattcaccaaaccccccaccaaaaccgccacccaccatgagatcacagagcccgtcaaaatggcaacaccttcagaggatccctaccaatgctccagcaatggttatttggaccgacctgatttacctgaaaatttcaaactcgtattggatgttatatgcaagcctccaggtcctgaacatcacaacaccagctgttatgagaaacgtgaaatcaacccaggaagtgtttgccctgatcttgtaacaatgaaggcaaacatgggcttaaacaatggtggtggggaggatgctgcaccttatatagaggttaccaccctttctacgtactccaacaaaagggcaatgtgtgtccacaatgggtgtgatcaaggcttctgtttcttcctttctggtttaagcactgatcaggagagagctgtgctagagcttggaggtcaacaggctatcatggagttgcattatgattcctactggaaacactattggagtaactctaattgtgttgttcccagaacaaactgcaacctgacagaccaaactgagattttgtttcctaggtttaacaacaagaatcagtctcagtgtaccacctgtgcagattcagctggcctagataacaaattttatctcacatgtgatgggcttttaagaaccctccctctagttggactacccagcctaagtcctcaggcttacaaagctgtacccacacaaactacaggcaccaccacggcaccaacatcagagacgaggcacccaacccctgcacccaggaggtccaaacctctcagtcggaagaagagagctttatgtggtgtagactcaagcagagaacccaaaccaacaatgccttactggtgtcctatgctccaattatttccaaggaggtctaattcttaagtgacctattcctgaattaacttcagaataagtaccaaccttatcagtagttaatgaaaactaagctttgatataataggacaaatatgattcctggcaggatctttctagtccttctggtgatcttcaacaccaagccaattcacccaaatacattaacagaaaaattctatgagtccacatgtagtgttgagactgcaggttataagagtgcccttagaacaggttggcatatgacagttatgtcaattaagttgtctcaaataaatattgagtcatgcaagagcagcaactcgttattggctcatgagcttgcaatctatagtagtgcagtggatgaattgagaacgttatcatccaatgccttgaagtccaaaaggaagaagaggttcctcggtttgattcttggtctcggagctgcagtcactgccggggtggctttagccaagacagtgcaacttgaaagtgagattgcattgattagagatgcagtgagaaatacaaatgaggctgttgttagcctaaccaacggcatgtcagtgttggctaaagtggtggatgatttgaaaaacttcatatctaaagaattactcccaaaaataaaccgagtctcttgtgatgtgcacgacatcactgccgtcattagattccaacagctcaacaaaagacttttggaagtatctcgtgaattttcatctaatgcaggattaacacacactgtttcatcttttatgttaacagaccgggaactcacctccattgtaggcggcatggctgtttcagcaggccaaaaagagataatgctatctagcaaagctataatgagaagaaatgggttagcaatattaagttcagtcaacgctgacacactggtttatgtaatacaactcccattatttggtgttatggacacagattgttgggtaataagaagttctatagactgtcataacatagcagacaagtatgcttgtttggctagagctgataatggctggtattgtcacaatgctggctcattatcatacttcccgtcgccaacggattgtgagatccacaatgggtatgctttctgtgacactctaaaaagtctaactgtacctgtaacatcacgagaatgcaactcaaacatgtataccactaactacgattgtaagatttccacaagtaaaacttatgtgagtacagcggtactgactacaatgggttgcttggtatcttgttatggtcataacagttgcacagtcatcaataatgacaaaggtataataaggactctgccagatggttgccactacatctccaacaaaggtgtggacagggttcaagtaggtaacactgtttactatcttagcaaagaagttggcaagtcaattgttgtcagaggggaaccattggtcttgaaatatgaccctttgagtttccctgacgataaatttgatgttgctataagagatgtggagcatagcatcaatcagacacgcacattcttgaaggcctctgatcagttattggacttaagtgaaaacagagagaataaaaatttaaacaagtcatatatactaacaactctgctcttcgttgtaatgcttattataataatggctgtcatagggttcattctgtataaggtattgaaaatgatcagagacaacaagttgaaatccaaaagtacacctggcctcacagttttatcatgacaattgtaccaaaccataattgagttagttaattaaaaacttaggataagtgacaatccagacccaacacctctttcaactctcaaggataaggtaggatgagtgtgagaccttgcaaatttgaggttcaagggttttgttccagagggaggaattgcaagtatagtcataaatattgggaatggcctttgaaaactcttatgctcaggcagaactacatgcttaataggatttataggttcctcgacaccaacacagatgcaatgtcagatgtcagcggatttgatgcaccacaaaggactgctgagtatgccttgggaaccataggtgtgctgaaaagttacctggaaaaaactaacaacatcactaaatcaatagcttgtggcagtttgatcactgtattgcagaacttggatgttggtctagtaatacaagcaagagatagcaacactgaggacaccaattacttgagaagttgcaacactatactgtcttatatagacaagatacacaagaagagacaaattattcacattctcaaaagactgccagtaggagtactatgcaatctgatccaatctgtcatctccatcgaggagaagataaattcttctatgaaaacagaatgataaggctgcctaaatactatccagccatactgcataagatgtatattattagagtaaatagaaacctcacttacgatgggtctggaccatccacaataatagatgcaggaaagtctgtggtgtggaatcgtgttgatgtgatagcttgtgtgaaagaggccttgtgctgcatagaattcagctggaataaccaagtgatcatagactttgattatagccaggccagatgatgtggactgtattcctttttttgtcagtaatcagttattaacccaaaattgttaattatgtagactttaagttaactaacttcatgttaattcaatagttatataaaaaaatattcgaattaggatcaatatggatcctattgatgaacaagaagttaatgtgtacttgccggatagctacttaaagggtgttatatcttttagtgaaactaatgctcttggcagctgtatcattggtagacctttcttgaaggatgactttactgccactacttcaatccgtaaccccctaattgaacataaaagaataagggacactaaattagtaaaaaatattgtttcaaaccctcaatataggttagtggagcctctccaaatgcagcatgagctcttgagtgtactatcgcccaatttcatattgcacactgccaacttaaggaaaattatacaaagaagtgttgacataacagataaaaagttgaaccccattttgcacattttgaatcttaattctcctaaccaagagggtaaggtgtcggaacggctaactaggctaattaagaaacatctctctcacatacctaattgggtaagcagctggtacaatatatgggtcaatcttaacaacttactgcaggagtaccgttcaaaggaagttatagaccataactgtgttctgactaggcaattgtctggaagtttcatacatgtggtcatgagtcaatatggagttgtgataattagcaaaaaaagtaaaagatatacaatgtgtacttataaccaattcctaacctggaaggaccttgccttgagcagatttaatgccaattatgtggtctggctaagtaatgtgttaaacacactcaacgaggggttgggattaaggtgtagattaaaaggtcatctgctcagtaagttgtacatttccactgacatctttttatcttcaacatctaatgaattttataatgtggtcaaggaatttgagggcttcatcatgtcactgatattgaaacaaactgaggaagccttatttagcacaaggttttataataacatgttgaacaacttaattgatgccattgatagggctcgactagagtatctggcccgctgtgccaattcagctgccaggattaatttacctagtacagatgttatgatagcatcattgggtgatatcttatctttgataaacgttttaggtgaatccaaccttaacaacttaagtgagttatattttatcttcaggatatttggtcaccctatggttgatgagaggaaggccatggatgcagtcagagataactgttgtgaaacaaagtttctgacggctaagaaccttgcatcgttaagaggagcatatgtttatagaattatcaaaggattcgtagcaaattataacaggtggccttacataaaaactagagtttgccttacaccaacatggattaactatcttgacaccaattcatgtccctcattattagagatgacagaagatgattttattgtgttagctggagtgcactttataagagaattccacatcccaaagctaactgatctggagattatattaaatgacaaggccatatctcctccaaaatcactcatttggtcatgctttccaaaaaactacatacctcaggttatacaagatgagtatgcccggaggtattgtagagctaaagcacctttgaagacaagacgtgtcttggagttctacttacaggacaaggatttcaagttggatcagctccatagagtagtagtgaaccaggactaccttaatgataaagaacatataatttctttaacaggaaaagaaagagagttgggtgttggtaggatgtttgccatgcaacctgggaagcagaggcaagtccaaattttagcagagaagctgttggctgataacatcctgcaattctttccggagacactgactagatacggtgatttggagctgcaaaagatactagagttaaaagctggactttcaaataaaaatgacagatctaaagactcctacaataattatataagtaggtgctcattaattactgatttaagtaaatttaaccaagcttttaggtacgagtcatcctgtgtgtgtagtgatcttttagatgagctacatgggactcaaagcttattctcttggctgcatttaacagtaccactgactactataatgtgtacatataggcatgcgccgccggacactggaaacaactataatgtagatgatattgctgagcagagtggactctaccgctaccacatgggcgggattgagggctggtgccagaagctctggacaacagaggccattgctttgctagatactgtagctgtgaagggccgtttccagctaacttcattaataaatggcgacaaccaaagtattgatatttcaaaaccaacaaggctggggaccaggactcaaagtgaagcagattatgatttggcaataaattctttaagattaatatcagcagcttataaaggcattggacataaattaaaagaaggtgagacctacttgtcacgtgacatgcagttcatgagtaaaacaatacaacatgaaggggtctactacccggcctccatcaagaaaatattaagagttggtccctggatcaacacaatattagatgatataaaaacttcaacagaaagtattggttctctaactcaagaactagaatataaaggtgaaagtttaatgagcagcctgctgctgaggaacttctggctctacagattatattcagtggatttaaaagatcattctttgtgtggaaagcagctctacagatccttaataaaagtgttaaaacatttgaagaggtgcttcaacctggagaaccttggggaatgtttggaattatttttaaatgtgcccatgcagtttggaggtgctgacccaaatgtcatctacaggagcttctacagaagaactccagattttctaacagaaagtataactcatctcatcctcattttaaaacattttagaagagatttggaattcaacaaagataatgtctccaaagctgttctttctttgctagagttcaccaagaatgattctgcagaatttgtaactttgatgagagatcctcaagcaattggtagtgagaggcaggccaagatcacttcagacatcaacagaacagctgtaacttcagtgttatcaaatgctccaaatgaaatatttagaacttcagctcttcattacagcagcacagaaaatgaattaaatggaatagcaagtggagtttctcctgtttatcctcatggtcttcgagttttatatgaaagtttacctttttataaagcagagaagattgtcaacatggtttctgggaccaagtccatcaccaacatactggagaagacatcagccatctcctacacagatataattcgagccaccaacatgatggtggagaacctcactttgctaacaagaataatgaaaccaggtgctgacacatctttggatcctgacacaatagtaataacaatattatcaaaaataataagagataaatcctgggatgttggtgatataattggtgtcacttccccatctcctgtctcctgcttcaaggtggtctacacatcaactctacaaaataattcagtagtaatagaaagatacacaacagacacctacacaagaggtaagagaggccccaccaagccctgggtgggcagcagcacacaggagaagaagtccatgcctgtctacaacagacaagttttaacaagaggacaaagagatcaaatagaaaatatagcaaagctggagtgggtgttttcttcagtagcaaatattgattctttgctaaatgagctcagcaccatgactttgggtctttctctaaggaaatgtagacaactttttccaacatatttaagtttaaacttcctgcacaggctttctgtcagcagcaggcccagagaatatccttcttctcttcctgcctacaggacaacaaattttcattttgatactggaccaataaataaagtgttaacagaaagatttggagatgaagatataaatttggtatttcaaaatgcaatatcatatggtctttccaccatgtctttggtggagcagtttactggtgtctgtccaaataaagttttgctggtgcccaagctacaagaaatacaactaatgaaagttccaatatttcaaggtggcttcaacctacaaagtataattccaataataaggcagcagcacatgttcctgcccaaccacatcactccagcccagtatattgaattatttctttcttcaaaacaatttcattcaagaataaatttaaaacacaacaacagatttaaacttgttttacaaaaagattattttaatggggagaacatgatagaaactttgtccacctgtttggcaggccactggatcatcattttgatgctaatgaaggagagtcaggggatatttgacaaggagtggtatgatggttttgtaacagaccacatgttcctggacctgcagctcttcctctcctccttcaagacatttctaactgtcttcaactttgcttatttaaaagttggttcaaatatagaagaaataacaggaaatcaagccaacctgctggagctgctggacctgggctactggaagaacatgtataaagtattttcagagaccaaggtgcggctggctttgctaaaacaagatttatcatttaattctgtgaagaacagcagcagcttccggcactggtttataaattctctacaagaagtacaatgtacttctgtgccttgggtggtaaatgtaacaagaaatccaactcatttaaaaggtgttctacagtacatgaagatgatagaaagtggcatgattcaaggttattcagcaaatatttcttcagttttaagtatcccatataattatccagacatggcgcacatgatgacaaaaataataagaaatcgaggccacatgtcctatgattatccaaagatgaagaaaagtttaactttctccatgacagacatgagtgacagctacatgctcaacctcttccccaaagtagaatgttcttacatgagtggttatttggataaactagatgatactctacaacttctaaagaaacctcctgttggaagaaaagttccttctgtggctttgccctggcaccactgcaacagatacaactttgtcttcagcagcacaggctgcaaagtttctgtcattgacatgcttccaaaacatttccgaagaagtaatttaaaagtaatatgttttattggagaaggggcgggcaacctcatgctaagagctgttttggaagttggtggaaatataaaattaatatatagatccttaaaagatcctgatgatcatcatgttcctgtagaatttctaagattaaaaccttgttatccttatattgatactggtggcagtttatctttggcttcaacagatgccaccaacaaggcccactgggattatttacatcttcactggacagatcctttaaatttaatagtatgtgatgcagaaataagtggtgtgaagcactggctaaaaattcttcacaggtggtatgagcacatgacttcctgcaagcactgtttaaaatcagaacatgataaatatttaataataaaatatcatgctcaagatgatttaatagatcttcctcatggtgtcaggctactaaaatgtaacatctgcctgggctccaaactaagtggcagtgagagctacctgctcattggtcttggtctttcaaataaacttcctgtctacagtgaagttcttcattcaaaacttcttttggcagaatgtcatcagtttcatcatccaaaatatttggatgtttctggaataaatacaaatataaaatccttaataccaatgttggattatccaataacttacaacaagatcaccactttgctagaaagtgtgcgggagctttcttcaaataaaaacaagaacaccatgtggattggaagaaatcctgtctaccataataaatggctaaagaggaaatatttcaacattttaaaatggctaaaatactgtatagaacttcctgccttcaggatggattataattcatttgagagaatagaaatgctttatccaaatttaagagatttggtagattctgtttctacttcagagctgaagaaagtaataaaagtaacaggcatcctcttcaggagcaacaccatgtgaattaatatgccaatgctaacatgtcatccccactactttttttgttcaatcactctcagtctagacatgtgagaagatcccaaacccaactgcacccctcccactcgaaatcagttgtagcctcagcagctccatctgccatgatctctgaccagcagcaaatgtattattattttaatttgtctatagttaacaaaaaattgatatctcacaggttgtaaacatagttcttttataattattgttagttaaactattgtgtttgacttcctttgggtatttttttcccgt

SEQ ID NO: 32 - DNA, 21754 bp, synthetic construct
  source 1..21754: mol_type = other DNA
acgcgaaaaaatgcataacaaaactatcaacctgaaaaaagttaggacaagtgaagattgctagtcccaaagaccagaatcatgggctgtaatgtgatgatggagcttgattatggtggacgagctgcatggctggcattccacataaccaactttgataggtcagatttggaaactatcctaagaggtgctagggtgtgcaatacatggcaagatcagagactctccgtgtaccttgtgggaagggattgcaatttgttaagaccatttgtgcaagctgccaaatttatccataatactaggagaggccaaacattaacacattggttcacaaaaaatatcgtgtttagttctacagggcaagagacagagcctcccattgaccccacatgtgagctgttggtagagctgatcagtggttaagatgacagcacattatgtagttaattaaaacaaagggtaggacaagtcctaatgtccacagctatgaacaagttcactcagaccatctctaaacctgccactatcttgaatatttcagacagtgaagagtcgggcgatgaggcaggggtgggcaaggtgtcccgtaccacacagagctcagagaggtggcttgatttgctcattgaaaagttccagccgagcctacaaaacatcactagatacatcaactggaacttcatcaggatctgcaatgataggcttaaaaaagaaaaaatggggtacattgaggccaagcaatatgtggaagacatggcttggatggtgatagcatctgaggcagacagcattgagtggaagtgcataaggaggcaggagaaagtgactggggtgaaatacccaaagttcttctttgtacaacacaaagaggactggattgagtgcacaggatgcattccgtacccaggccatgacttgatctatgatgaggatgatgatgactgagctgactcagatcactccaaccagcagagagatccatagttatagaaaaacattaggataaatacacatcctaggccgccaccatgttcgtgtttctggtgctgctgcctctggtgagctcccagtgcgtgaacctgaccacaaggacccagctgccccctgcctataccaattccttcacacggggcgtgtactatcccgacaaggtgtttagatctagcgtgctgcactccacacaggatctgtttctgcctttcttttctaacgtgacctggttccacgccatccacgtgagcggcaccaatggcacaaagcggttcgacaatccagtgctgccctttaacgatggcgtgtacttcgcctccaccgagaagtctaacatcatcagaggctggatctttggcaccacactggacagcaagacacagtccctgctgatcgtgaacaatgccaccaacgtggtcatcaaggtgtgcgagttccagttttgtaatgatccattcctgggcgtgtactatcacaagaacaataagtcttggatggagagcgagtttcgcgtgtattcctctgccaacaattgcacatttgagtacgtgtcccagcccttcctgatggacctggagggcaagcagggcaatttcaagaacctgagggagttcgtgtttaagaatatcgatggctacttcaagatctactccaagcacaccccaatcaacctggtgcgcgacctgccacagggcttctctgccctggagccactggtggatctgcccatcggcatcaacatcacccggtttcagacactgctggccctgcacagaagctacctgacaccaggcgacagctcctctggatggaccgcaggagctgccgcctactatgtgggctatctgcagcccaggaccttcctgctgaagtacaacgagaatggcaccatcacagacgccgtggattgcgccctggatcccctgtctgagaccaagtgtacactgaagagctttaccgtggagaagggcatctatcagacaagcaatttcagggtgcagcctaccgagtccatcgtgcgctttcccaatatcacaaacctgtgcccttttggcgaggtgttcaacgcaacccgcttcgccagcgtgtacgcctggaataggaagcgcatctccaactgcgtggccgactattctgtgctgtacaacagcgcctccttctctacctttaagtgctatggcgtgagccccacaaagctgaatgacctgtgctttaccaacgtgtacgccgattccttcgtgatcaggggcgacgaggtgcgccagatcgcccctggccagacaggcaagatcgccgactacaattataagctgcctgacgatttcaccggctgcgtgatcgcctggaactctaacaatctggatagcaaagtgggcggcaactacaattatctgtaccggctgtttagaaagtctaatctgaagccattcgagagggacatctccacagagatctaccaggccggctctaccccctgcaatggcgtggagggctttaactgttatttccctctgcagagctacggcttccagccaacaaacggcgtgggctatcagccctaccgcgtggtggtgctgtcttttgagctgctgcacgcacctgcaacagtgtgcggaccaaagaagagcaccaatctggtgaagaacaagtgcgtgaacttcaacttcaacggactgaccggcacaggcgtgctgaccgagtccaacaagaagttcctgccttttcagcagttcggcagggacatcgcagataccacagacgccgtgcgcgaccctcagaccctggagatcctggatatcacaccatgctccttcggcggcgtgtctgtgatcacaccaggcaccaatacaagcaaccaggtggccgtgctgtatcaggacgtgaattgtaccgaggtgcccgtggcaatccacgcagatcagctgacccctacatggcgggtgtactctaccggcagcaacgtgttccagacaagagccggatgcctgatcggagccgagcacgtgaacaatagctatgagtgcgacatccctatcggcgccggcatctgtgcctcctaccagacccagacaaactccccagggtctgcctcctctgtggccagccagtccatcatcgcctataccatgagcctgggcgccgagaattccgtggcctactccaacaattctatcgccatccctaccaacttcacaatctccgtgaccacagagatcctgccagtgagcatgaccaagacatccgtggactgcacaatgtatatctgtggcgattccaccgagtgctctaacctgctgctgcagtacggctctttttgtacccagctgaatagagccctgacaggcatcgccgtggagcaggacaagaacacacaggaggtgttcgcccaggtgaagcagatctacaagaccccacccatcaaggactttggcggcttcaacttcagccagatcctgcccgatcctagcaagccatccaagcggtctcctatcgaggacctgctgttcaacaaggtgaccctggccgatgccggcttcatcaagcagtatggcgattgcctgggcgacatcgccgccagagacctgatctgtgcccagaagtttaatggcctgaccgtgctgcctccactgctgacagatgagatgatcgcccagtacacatctgccctgctggccggcaccatcacaagcggatggaccttcggcgcaggacccgccctgcagatcccctttcccatgcagatggcctatcggttcaacggcatcggcgtgacccagaatgtgctgtacgagaaccagaagctgatcgccaatcagtttaactccgccatcggcaagatccaggactctctgagctccacacccagcgccctgggcaagctgcaggatgtggtgaatcagaacgcccaggccctgaataccctggtgaagcagctgtctagcaacttcggcgccatctcctctgtgctgaatgatatcctgagcaggctggaccctccagaggcagaggtgcagatcgaccggctgatcacaggcagactgcagtccctgcagacctacgtgacacagcagctgatcagggcagcagagatcagggcctctgccaatctggccgccaccaagatgagcgagtgcgtgctgggccagtccaagagagtggacttttgtggcaagggctatcacctgatgagcttcccacagtccgcccctcacggagtggtgtttctgcacgtgacctacgtgccagcccaggagaagaacttcaccacagcaccagcaatctgccacgatggcaaggcacactttcctagggagggcgtgttcgtgagcaacggcacccactggtttgtgacacagcgcaatttctacgagccacagatcatcaccacagacaatacattcgtgtccggcaactgtgacgtggtcatcggcatcgtgaacaataccgtgtatgatcctctgcagccagagctggactcttttaaggaggagctggataagtacttcaagaatcacaccagccccgacgtggatctgggcgacatctctggcatcaatgccagcgtggtgaacatccagaaggagatcgacaggctgaacgaggtggccaagaatctgaacgagtccctgatcgatctgcaggagctgggcaagtatgagcagtacatcaagtggccctggtatatctggctgggcttcatcgccggcctgatcgccatcgtgatggtgaccatcatgctgtgctgtatgacaagctgctgttcctgcctgaagggctgctgttcttgtggcagctgctgtaagtttgatgaggacgatagcgagcctgtgctgaagggcgtgaagctgcactacacctgatagccacctatagcaagtgatgtagtatttagtctatgattagttatagaaaaacattaggataaatacacatcctaggccgggccaaaatgtctctagacagattgaagctcaatgatgtctcaaacaaggatagcctgctgtccaactgcaaatacagtgttaccagatccacaggcgatgtaaccagtgtgtctggtcatgctatgcagaaagcccttgcaaggacactcggcatgttcttacttactgccttcaaccgttgcgaagaagtggcagaaatagggctccaatatgccatgtccttgctaggcagagatgatagcatcaagatattaagagaagccggctacaatgtaaaatgtgtggacacacagctcaaggactttacaatcaaattacaaggaaaggaatacaaaatacaagtcctagatatagtgggaatagatgcagccaatttagctgatctagagatacaagccagaggagtggtagcaaaagaactcaaaacaggagccaggctacctgacaatcggaggcatgatgcaccagattgtggtgtgatagttctctgtattgcagcattagttgtttccaaattagctgcaggggacaggggaggacttgatgctgtggaaagaagggctttaaatgtgctgaaagccgagaaagccaggtaccccaacatggaggtcaagcagatagctgaaagtttttatgatctgtttgaaaggaagccttattacattgatgtcttcatcacttttggcctggcccagtctagtgtcaagggaggcagcaaagttgaggggctgttttcaggtctcttcatgaatgcatacggggcaggacaagttatgctgaggtggggtttactggcaaaatctgtcaagaacatcatgctaggccatgctagtgtacaagctgagatggaacaggtggttgaggtttacgaatatgctcagaagcaaggaggggaggcaggattctatcacatcagaaataatccaaaagcttcacttctctctttgaccaattgtcctaatttcaccagtgttgtgcttggcaatgctgcaggtttaggcatcatagggtcatataagggtgctcctaggaatagagaactctttgatgctgccaaagattatgcagaaagattaaaggacaacaatgtaattaactacagtgcattaaacttgactgcagaagaaagagagctgatcagccagcagctgaacattgttgatgacactcctgatgatgatatttaattaaaactggaaaatgtaggataaatatggagaaattcgcccccgaatttgttggcgaggatgctaacaagaaggcagaggagtttctcaaacatagatccttcccttcggaaaaaccactagctggtataccgaacactgccactcatgtcaccaaatataacatgccccctatattgcgtagctcattcaaactcccttccccgagagttgctgcaaatcttactgaaccctctgctccccctaccactccaccacccacacctccccagaacaaggaagagcagcccaaagagtctgatgttgacattgagactatgcatgtctgtaaggttcctgacaatccggaacacagcaagaagccatgctgctcagatgataccgatactaagaaaactaggaagccgatggtcacctttgtggaacccgaggagaaatttgtcggattgggagctagcttgtacagggagaccatgcagacctttgctgctgatggttatgatgaagaaagcaacctatcgtttgaggagactaaccaagagccgggttcttcatctgtagaacaaagactagatagaatagaggagaaattgtcctacataataggccttttaaacaccataatggtagcgactgctggacctaccactgctagagatgagattagagatgcccttataggcactagagaagaacttattgagatgatcaagtctgacatcttgactgtcaatgacagaatagtggccatggagaagctcagagatgaggaatgctccagagctgacactgatgatggatcagcctgttatttaacagacagagcaaggatactagataagatagtgtccagcaatgctgaagaggctaaggaagatttggatgttgatgacatcatgggcattaatttttagttaattaaaataacaacaggacaaataatggaggcctacttggtagagatgtaccatggtgtcccatatacagctgcagtacagctaaacttggttgaaaaacattcagccaacatatcactaactgtgtggataccgatgtttcaaacatctctaccaaagaactccgttatggacctgctacatgatgttacagtcatttgtacacagatatcaacagtgcatggtcccatgatcaaggtagatctgagctcttccaatgcaggtttagctaccatgccaaggcaattcttgataaatgctatcatagctttggatgactggggcaacatggattacgaagtgcctgttgcttttgataaaaagagcttctgtgtgacaattcttaagcctaaaaacatgctttacactgtacccagcattactcccactaatcgacctactcatgagctgatagctgtctgctctttccataacagggtaacattaaagtcattcaatatacctgtcttcatcagagcactgtctatcagacagcaggaccttgatagtgtggagcaggctataagctccgatgtggaccatgctataacaacagctagggtggctccctatgcagggcttacacttgtgatcaacatcacatccaccaaaggagcattcaaactgctaaaggcaggtagtcagattcttgcagaactgggtccctatctgacgcaggtgagcctacatgatgtgattatgaactggaaacatacaggcacttcctacatactcaagagctcctcaacaagtggatgaaaaagagaaagtcaccattgatcagctcaatccacaactacaaccccacgatttcacacagcacaacaaccaccgccaccaacatccacatgacaaccacacatacacacccacatacatatatacacatatcttagttaaataaaatcaggataaataatggatcctaacatgacctcacaccagatcaccctcgagatcaacatgaccagcagccgtattggcacatacactacaccagccccaacagctcttctccttgcatgtgccgtcatcaacacagtgtgtgcgctgataatggcctgcagcagtagaagcactgccacatcaggcattgtcagcagccaatgcacagttcatcccaatcaccctccaccaagttatggcgtcaatgtaactggtctgccgggtaacctatactcaaggaacactacataacattataaataacagaaattatccttcaataaaccccaggccagacagctttaccctgctagacgattcaatcagcccttgcagtatgtcgtctagttaacaaaaaaccggtaggataagtactatcctattggaaccaaacgagacctgtagagcagctcacacaagagaaccacaagctgacttcacctagtatgggaaggaacttagaagtgagtggcagcattaccaatttgaactttgagagaactcagcatcctgacacatttaggactgttgtaaaagtgaaccaaatgtgtaagcttattgcaggtgtgctcacaagtgctgctgtggcagtttgtgtgggggtcataatgtattctgttttcacatcaaaccacaaggccaactccacgcagaatgccacgacccggaacagcacatccacccctccccaaccaaccgccggtctgcccaccacagagcaagggaccatccccagattcaccaaaccccccaccaaaaccgccacccaccatgagatcacagagcccgtcaaaatggcaacaccttcagaggatccctaccaatgctccagcaatggttatttggaccgacctgatttacctgaaaatttcaaactcgtattggatgttatatgcaagcctccaggtcctgaacatcacaacaccagctgttatgagaaacgtgaaatcaacccaggaagtgtttgccctgatcttgtaacaatgaaggcaaacatgggcttaaacaatggtggtggggaggatgctgcaccttatatagaggttaccaccctttctacgtactccaacaaaagggcaatgtgtgtccacaatgggtgtgatcaaggcttctgtttcttcctttctggtttaagcactgatcaggagagagctgtgctagagcttggaggtcaacaggctatcatggagttgcattatgattcctactggaaacactattggagtaactctaattgtgttgttcccagaacaaactgcaacctgacagaccaaactgagattttgtttcctaggtttaacaacaagaatcagtctcagtgtaccacctgtgcagattcagctggcctagataacaaattttatctcacatgtgatgggcttttaagaaccctccctctagttggactacccagcctaagtcctcaggcttacaaagctgtacccacacaaactacaggcaccaccacggcaccaacatcagagacgaggcacccaacccctgcacccaggaggtccaaacctctcagtcggaagaagagagctttatgtggtgtagactcaagcagagaacccaaaccaacaatgccttactggtgtcctatgctccaattatttccaaggaggtctaattcttaagtgacctattcctgaattaacttcagaataagtaccaaccttatcagtagttaatgaaaactaagctttgatataataggacaaatatgattcctggcaggatctttctagtccttctggtgatcttcaacaccaagccaattcacccaaatacattaacagaaaaattctatgagtccacatgtagtgttgagactgcaggttataagagtgcccttagaacaggttggcatatgacagttatgtcaattaagttgtctcaaataaatattgagtcatgcaagagcagcaactcgttattggctcatgagcttgcaatctatagtagtgcagtggatgaattgagaacgttatcatccaatgccttgaagtccaaaaggaagaagaggttcctcggtttgattcttggtctcggagctgcagtcactgccggggtggctttagccaagacagtgcaacttgaaagtgagattgcattgattagagatgcagtgagaaatacaaatgaggctgttgttagcctaaccaacggcatgtcagtgttggctaaagtggtggatgatttgaaaaacttcatatctaaagaattactcccaaaaataaaccgagtctcttgtgatgtgcacgacatcactgccgtcattagattccaacagctcaacaaaagacttttggaagtatctcgtgaattttcatctaatgcaggattaacacacactgtttcatcttttatgttaacagaccgggaactcacctccattgtaggcggcatggctgtttcagcaggccaaaaagagataatgctatctagcaaagctataatgagaagaaatgggttagcaatattaagttcagtcaacgctgacacactggtttatgtaatacaactcccattatttggtgttatggacacagattgttgggtaataagaagttctatagactgtcataacatagcagacaagtatgcttgtttggctagagctgataatggctggtattgtcacaatgctggctcattatcatacttcccgtcgccaacggattgtgagatccacaatgggtatgctttctgtgacactctaaaaagtctaactgtacctgtaacatcacgagaatgcaactcaaacatgtataccactaactacgattgtaagatttccacaagtaaaacttatgtgagtacagcggtactgactacaatgggttgcttggtatcttgttatggtcataacagttgcacagtcatcaataatgacaaaggtataataaggactctgccagatggttgccactacatctccaacaaaggtgtggacagggttcaagtaggtaacactgtttactatcttagcaaagaagttggcaagtcaattgttgtcagaggggaaccattggtcttgaaatatgaccctttgagtttccctgacgataaatttgatgttgctataagagatgtggagcatagcatcaatcagacacgcacattcttgaaggcctctgatcagttattggacttaagtgaaaacagagagaataaaaatttaaacaagtcatatatactaacaactctgctcttcgttgtaatgcttattataataatggctgtcatagggttcattctgtataaggtattgaaaatgatcagagacaacaagttgaaatccaaaagtacacctggcctcacagttttatcatgacaattgtaccaaaccataattgagttagttaattaaaaacttaggataagtgacaatccagacccaacacctctttcaactctcaaggataaggtaggatgagtgtgagaccttgcaaatttgaggttcaagggttttgttccagagggaggaattgcaagtatagtcataaatattgggaatggcctttgaaaactcttatgctcaggcagaactacatgcttaataggatttataggttcctcgacaccaacacagatgcaatgtcagatgtcagcggatttgatgcaccacaaaggactgctgagtatgccttgggaaccataggtgtgctgaaaagttacctggaaaaaactaacaacatcactaaatcaatagcttgtggcagtttgatcactgtattgcagaacttggatgttggtctagtaatacaagcaagagatagcaacactgaggacaccaattacttgagaagttgcaacactatactgtcttatatagacaagatacacaagaagagacaaattattcacattctcaaaagactgccagtaggagtactatgcaatctgatccaatctgtcatctccatcgaggagaagataaattcttctatgaaaacagaatgataaggctgcctaaatactatccagccatactgcataagatgtatattattagagtaaatagaaacctcacttacgatgggtctggaccatccacaataatagatgcaggaaagtctgtggtgtggaatcgtgttgatgtgatagcttgtgtgaaagaggccttgtgctgcatagaattcagctggaataaccaagtgatcatagactttgattatagccaggccagatgatgtggactgtattcctttttttgtcagtaatcagttattaacccaaaattgttaattatgtagactttaagttaactaacttcatgttaattcaatagttatataaaaaaatattcgaattaggatcaatatggatcctattgatgaacaagaagttaatgtgtacttgccggatagctacttaaagggtgttatatcttttagtgaaactaatgctcttggcagctgtatcattggtagacctttcttgaaggatgactttactgccactacttcaatccgtaaccccctaattgaacataaaagaataagggacactaaattagtaaaaaatattgtttcaaaccctcaatataggttagtggagcctctccaaatgcagcatgagctcttgagtgtactatcgcccaatttcatattgcacactgccaacttaaggaaaattatacaaagaagtgttgacataacagataaaaagttgaaccccattttgcacattttgaatcttaattctcctaaccaagagggtaaggtgtcggaacggctaactaggctaattaagaaacatctctctcacatacctaattgggtaagcagctggtacaatatatgggtcaatcttaacaacttactgcaggagtaccgttcaaaggaagttatagaccataactgtgttctgactaggcaattgtctggaagtttcatacatgtggtcatgagtcaatatggagttgtgataattagcaaaaaaagtaaaagatatacaatgtgtacttataaccaattcctaacctggaaggaccttgccttgagcagatttaatgccaattatgtggtctggctaagtaatgtgttaaacacactcaacgaggggttgggattaaggtgtagattaaaaggtcatctgctcagtaagttgtacatttccactgacatctttttatcttcaacatctaatgaattttataatgtggtcaaggaatttgagggcttcatcatgtcactgatattgaaacaaactgaggaagccttatttagcacaaggttttataataacatgttgaacaacttaattgatgccattgatagggctcgactagagtatctggcccgctgtgccaattcagctgccaggattaatttacctagtacagatgttatgatagcatcattgggtgatatcttatctttgataaacgttttaggtgaatccaaccttaacaacttaagtgagttatattttatcttcaggatatttggtcaccctatggttgatgagaggaaggccatggatgcagtcagagataactgttgtgaaacaaagtttctgacggctaagaaccttgcatcgttaagaggagcatatgtttatagaattatcaaaggattcgtagcaaattataacaggtggccttacataaaaactagagtttgccttacaccaacatggattaactatcttgacaccaattcatgtccctcattattagagatgacagaagatgattttattgtgttagctggagtgcactttataagagaattccacatcccaaagctaactgatctggagattatattaaatgacaaggccatatctcctccaaaatcactcatttggtcatgctttccaaaaaactacatacctcaggttatacaagatgagtatgcccggaggtattgtagagctaaagcacctttgaagacaagacgtgtcttggagttctacttacaggacaaggatttcaagttggatcagctccatagagtagtagtgaaccaggactaccttaatgataaagaacatataatttctttaacaggaaaagaaagagagttgggtgttggtaggatgtttgccatgcaacctgggaagcagaggcaagtccaaattttagcagagaagctgttggctgataacatcctgcaattctttccggagacactgactagatacggtgatttggagctgcaaaagatactagagttaaaagctggactttcaaataaaaatgacagatctaaagactcctacaataattatataagtaggtgctcattaattactgatttaagtaaatttaaccaagcttttaggtacgagtcatcctgtgtgtgtagtgatcttttagatgagctacatgggactcaaagcttattctcttggctgcatttaacagtaccactgactactataatgtgtacatataggcatgcgccgccggacactggaaacaactataatgtagatgatattgctgagcagagtggactctaccgctaccacatgggcgggattgagggctggtgccagaagctctggacaacagaggccattgctttgctagatactgtagctgtgaagggccgtttccagctaacttcattaataaatggcgacaaccaaagtattgatatttcaaaaccaacaaggctggggaccaggactcaaagtgaagcagattatgatttggcaataaattctttaagattaatatcagcagcttataaaggcattggacataaattaaaagaaggtgagacctacttgtcacgtgacatgcagttcatgagtaaaacaatacaacatgaaggggtctactacccggcctccatcaagaaaatattaagagttggtccctggatcaacacaatattagatgatataaaaacttcaacagaaagtattggttctctaactcaagaactagaatataaaggtgaaagtttaatgagcagcctgctgctgaggaacttctggctctacagattatattcagtggatttaaaagatcattctttgtgtggaaagcagctctacagatccttaataaaagtgttaaaacatttgaagaggtgcttcaacctggagaaccttggggaatgtttggaattatttttaaatgtgcccatgcagtttggaggtgctgacccaaatgtcatctacaggagcttctacagaagaactccagattttctaacagaaagtataactcatctcatcctcattttaaaacattttagaagagatttggaattcaacaaagataatgtctccaaagctgttctttctttgctagagttcaccaagaatgattctgcagaatttgtaactttgatgagagatcctcaagcaattggtagtgagaggcaggccaagatcacttcagacatcaacagaacagctgtaacttcagtgttatcaaatgctccaaatgaaatatttagaacttcagctcttcattacagcagcacagaaaatgaattaaatggaatagcaagtggagtttctcctgtttatcctcatggtcttcgagttttatatgaaagtttacctttttataaagcagagaagattgtcaacatggtttctgggaccaagtccatcaccaacatactggagaagacatcagccatctcctacacagatataattcgagccaccaacatgatggtggagaacctcactttgctaacaagaataatgaaaccaggtgctgacacatctttggatcctgacacaatagtaataacaatattatcaaaaataataagagataaatcctgggatgttggtgatataattggtgtcacttccccatctcctgtctcctgcttcaaggtggtctacacatcaactctacaaaataattcagtagtaatagaaagatacacaacagacacctacacaagaggtaagagaggccccaccaagccctgggtgggcagcagcacacaggagaagaagtccatgcctgtctacaacagacaagttttaacaagaggacaaagagatcaaatagaaaatatagcaaagctggagtgggtgttttcttcagtagcaaatattgattctttgctaaatgagctcagcaccatgactttgggtctttctctaaggaaatgtagacaactttttccaacatatttaagtttaaacttcctgcacaggctttctgtcagcagcaggcccagagaatatccttcttctcttcctgcctacaggacaacaaattttcattttgatactggaccaataaataaagtgttaacagaaagatttggagatgaagatataaatttggtatttcaaaatgcaatatcatatggtctttccaccatgtctttggtggagcagtttactggtgtctgtccaaataaagttttgctggtgcccaagctacaagaaatacaactaatgaaagttccaatatttcaaggtggcttcaacctacaaagtataattccaataataaggcagcagcacatgttcctgcccaaccacatcactccagcccagtatattgaattatttctttcttcaaaacaatttcattcaagaataaatttaaaacacaacaacagatttaaacttgttttacaaaaagattattttaatggggagaacatgatagaaactttgtccacctgtttggcaggccactggatcatcattttgatgctaatgaaggagagtcaggggatatttgacaaggagtggtatgatggttttgtaacagaccacatgttcctggacctgcagctcttcctctcctccttcaagacatttctaactgtcttcaactttgcttatttaaaagttggttcaaatatagaagaaataacaggaaatcaagccaacctgctggagctgctggacctgggctactggaagaacatgtataaagtattttcagagaccaaggtgcggctggctttgctaaaacaagatttatcatttaattctgtgaagaacagcagcagcttccggcactggtttataaattctctacaagaagtacaatgtacttctgtgccttgggtggtaaatgtaacaagaaatccaactcatttaaaaggtgttctacagtacatgaagatgatagaaagtggcatgattcaaggttattcagcaaatatttcttcagttttaagtatcccatataattatccagacatggcgcacatgatgacaaaaataataagaaatcgaggccacatgtcctatgattatccaaagatgaagaaaagtttaactttctccatgacagacatgagtgacagctacatgctcaacctcttccccaaagtagaatgttcttacatgagtggttatttggataaactagatgatactctacaacttctaaagaaacctcctgttggaagaaaagttccttctgtggctttgccctggcaccactgcaacagatacaactttgtcttcagcagcacaggctgcaaagtttctgtcattgacatgcttccaaaacatttccgaagaagtaatttaaaagtaatatgttttattggagaaggggcgggcaacctcatgctaagagctgttttggaagttggtggaaatataaaattaatatatagatccttaaaagatcctgatgatcatcatgttcctgtagaatttctaagattaaaaccttgttatccttatattgatactggtggcagtttatctttggcttcaacagatgccaccaacaaggcccactgggattatttacatcttcactggacagatcctttaaatttaatagtatgtgatgcagaaataagtggtgtgaagcactggctaaaaattcttcacaggtggtatgagcacatgacttcctgcaagcactgtttaaaatcagaacatgataaatatttaataataaaatatcatgctcaagatgatttaatagatcttcctcatggtgtcaggctactaaaatgtaacatctgcctgggctccaaactaagtggcagtgagagctacctgctcattggtcttggtctttcaaataaacttcctgtctacagtgaagttcttcattcaaaacttcttttggcagaatgtcatcagtttcatcatccaaaatatttggatgtttctggaataaatacaaatataaaatccttaataccaatgttggattatccaataacttacaacaagatcaccactttgctagaaagtgtgcgggagctttcttcaaataaaaacaagaacaccatgtggattggaagaaatcctgtctaccataataaatggctaaagaggaaatatttcaacattttaaaatggctaaaatactgtatagaacttcctgccttcaggatggattataattcatttgagagaatagaaatgctttatccaaatttaagagatttggtagattctgtttctacttcagagctgaagaaagtaataaaagtaacaggcatcctcttcaggagcaacaccatgtgaattaatatgccaatgctaacatgtcatccccactactttttttgttcaatcactctcagtctagacatgtgagaagatcccaaacccaactgcacccctcccactcgaaatcagttgtagcctcagcagctccatctgccatgatctctgaccagcagcaaatgtattattattttaatttgtctatagttaacaaaaaattgatatctcacaggttgtaaacatagttcttttataattattgttagttaaactattgtgtttgacttcctttgggtatttttttcccgtgggtcggcatggcatctccacctcctcgcggtccgacctgggcatccgaaggaggacgcacgtccactcggatggctaagggagagcctgcagtagcataaccccttggggcctctaaacgggtcttgaggggttttttgctgaaaggaggaactatatacgcgtcgacgggcccgcgctcactggccgtcgttttacaacgtcgtgactgggaaaaccctggcgttacccaacttaatcgccttgcagcacatccccctttcgccagctggcgtaatagcgaagaggcccgcaccgatcgcccttcccaacagttgcgcagcctgaatggcgaatgggacgcgccctgtagcggcgcattaagcgcggcgggtgtggtggttacgcgcagcgtgaccgctacacttgccagcgccctagcgcccgctcctttcgctttcttcccttcctttctcgccacgttcgccggctttccccgtcaagctctaaatcgggggctccctttagggttccgatttagtgctttacggcacctcgaccccaaaaaacttgattagggtgatggttcacgtagtgggccatcgccctgatagacggtttttcgccctttgacgttggagtccacgttctttaatagtggactcttgttccaaactggaacaacactcaaccctatctcggtctattcttttgatttataagggattttgccgatttcggcctattggttaaaaaatgagctgatttaacaaaaatttaacgcgaattttaacaaaatattaacgcttacaatttaggtggcacttttcggggaaatgtgcgcggaacccctatttgtttatttttctaaatacattcaaatatgtatccgctcatgagacaataaccctgataaatgcttcaataatattgaaaaaggaagagtatgagtattcaacatttccgtgtcgcccttattcccttttttgcggcattttgccttcctgtttttgctcacccagaaacgctggtgaaagtaaaagatgctgaagatcagttgggtgcacgagtgggttacatcgaactggatctcaacagcggtaagatccttgagagttttcgccccgaagaacgttttccaatgatgagcacttttaaagttctgctatgtggcgcggtattatcccgtattgacgccgggcaagagcaactcggtcgccgcatacactattctcagaatgacttggttgagtactcaccagtcacagaaaagcatcttacggatggcatgacagtaagagaattatgcagtgctgccataaccatgagtgataacactgcggccaacttacttctgacaacgatcggaggaccgaaggagctaaccgcttttttgcacaacatgggggatcatgtaactcgccttgatcgttgggaaccggagctgaatgaagccataccaaacgacgagcgtgacaccacgatgcctgtagcaatggcaacaacgttgcgcaaactattaactggcgaactacttactctagcttcccggcaacaattaatagactggatggaggcggataaagttgcaggaccacttctgcgctcggcccttccggctggctggtttattgctgataaatctggagccggtgagcgtgggtctcgcggtatcattgcagcactggggccagatggtaagccctcccgtatcgtagttatctacacgacggggagtcaggcaactatggatgaacgaaatagacagatcgctgagataggtgcctcactgattaagcattggtaactgtcagaccaagtttactcatatatactttagattgatttaaaacttcatttttaatttaaaaggatctaggtgaagatcctttttgataatctcatgaccaaaatcccttaacgtgagttttcgttccactgagcgtcagaccccgtagaaaagatcaaaggatcttcttgagatcctttttttctgcgcgtaatctgctgcttgcaaacaaaaaaaccaccgctaccagcggtggtttgtttgccggatcaagagctaccaactctttttccgaaggtaactggcttcagcagagcgcagataccaaatactgtccttctagtgtagccgtagttaggccaccacttcaagaactctgtagcaccgcctacatacctcgctctgctaatcctgttaccagtggctgctgccagtggcgataagtcgtgtcttaccgggttggactcaagacgatagttaccggataaggcgcagcggtcgggctgaacggggggttcgtgcacacagcccagcttggagcgaacgacctacaccgaactgagatacctacagcgtgagctatgagaaagcgccacgcttcccgaagggagaaaggcggacaggtatccggtaagcggcagggtcggaacaggagagcgcacgagggagcttccagggggaaacgcctggtatctttatagtcctgtcgggtttcgccacctctgacttgagcgtcgatttttgtgatgctcgtcaggggggcggagcctatggaaaaacgccagcaacgcggcctttttacggttcctggccttttgctggccttttgctcacatgttctttcctgcgttatcccctgattctgtggataaccgtattaccgcctttgagtgagctgataccgctcgccgcagccgaacgaccgagcgcagcgagtcagtgagcgaggaagcggaagagcgcccaatacgcaaaccgcctctccccgcgcgttggccgattcattaatgcagctggcacgacaggtttcccgactggaaagcgggcagtgagcgcaacgcaattaatgtgagttagctcactcattaggcaccccaggctttacactttatgcttccggctcgtatgttgtgtggaattgtgagcggataacaatttcacacaggaaacagctatgaccatgattacgccaagcgcgcccgggtaatacgactcactataggg

SEQ ID NO: 33 - protein, 1273 aa, SARS-CoV-2
MFVFLVLLPLVSSQCVNLTTRTQLPPAYTNSFTRGVYYPDKVFRSSVLHSTQDLFLPFFSNVTWFHAIHVSGTNGTKRFDNPVLPFNDGVYFASTEKSNIIRGWIFGTTLDSKTQSLLIVNNATNVVIKVCEFQFCNDPFLGVYYHKNNKSWMESEFRVYSSANNCTFEYVSQPFLMDLEGKQGNFKNLREFVFKNIDGYFKIYSKHTPINLVRDLPQGFSALEPLVDLPIGINITRFQTLLALHRSYLTPGDSSSGWTAGAAAYYVGYLQPRTFLLKYNENGTITDAVDCALDPLSETKCTLKSFTVEKGIYQTSNFRVQPTESIVRFPNITNLCPFGEVFNATRFASVYAWNRKRISNCVADYSVLYNSASFSTFKCYGVSPTKLNDLCFTNVYADSFVIRGDEVRQIAPGQTGKIADYNYKLPDDFTGCVIAWNSNNLDSKVGGNYNYLYRLFRKSNLKPFERDISTEIYQAGSTPCNGVEGFNCYFPLQSYGFQPTNGVGYQPYRVVVLSFELLHAPATVCGPKKSTNLVKNKCVNFNFNGLTGTGVLTESNKKFLPFQQFGRDIADTTDAVRDPQTLEILDITPCSFGGVSVITPGTNTSNQVAVLYQDVNCTEVPVAIHADQLTPTWRVYSTGSNVFQTRAGCLIGAEHVNNSYECDIPIGAGICASYQTQTNSPRRARSVASQSIIAYTMSLGAENSVAYSNNSIAIPTNFTISVTTEILPVSMTKTSVDCTMYICGDSTECSNLLLQYGSFCTQLNRALTGIAVEQDKNTQEVFAQVKQIYKTPPIKDFGGFNFSQILPDPSKPSKRSFIEDLLFNKVTLADAGFIKQYGDCLGDIAARDLICAQKFNGLTVLPPLLTDEMIAQYTSALLAGTITSGWTFGAGAALQIPFAMQMAYRFNGIGVTQNVLYENQKLIANQFNSAIGKIQDSLSSTASALGKLQDVVNQNAQALNTLVKQLSSNFGAISSVLNDILSRLDKVEAEVQIDRLITGRLQSLQTYVTQQLIRAAEIRASANLAATKMSECVLGQSKRVDFCGKGYHLMSFPQSAPHGVVFLHVTYVPAQEKNFTTAPAICHDGKAHFPREGVFVSNGTHWFVTQRNFYEPQIITTDNTFVSGNCDVVIGIVNNTVYDPLQPELDSFKEELDKYFKNHTSPDVDLGDISGINASVVNIQKEIDRLNEVAKNLNESLIDLQELGKYEQYIKWPWYIWLGFIAGLIAIVMVTIMLCCMTSCCSCLKGCCSCGSCCKFDEDDSEPVLKGVKLHYT

SEQ ID NO: 34 - protein, 1273 aa, synthetic construct
MFVFLVLLPLVSSQCVNLTTRTQLPPAYTNSFTRGVYYPDKVFRSSVLHSTQDLFLPFFSNVTWFHAIHVSGTNGTKRFDNPVLPFNDGVYFASTEKSNIIRGWIFGTTLDSKTQSLLIVNNATNVVIKVCEFQFCNDPFLGVYYHKNNKSWMESEFRVYSSANNCTFEYVSQPFLMDLEGKQGNFKNLREFVFKNIDGYFKIYSKHTPINLVRDLPQGFSALEPLVDLPIGINITRFQTLLALHRSYLTPGDSSSGWTAGAAAYYVGYLQPRTFLLKYNENGTITDAVDCALDPLSETKCTLKSFTVEKGIYQTSNFRVQPTESIVRFPNITNLCPFGEVFNATRFASVYAWNRKRISNCVADYSVLYNSASFSTFKCYGVSPTKLNDLCFTNVYADSFVIRGDEVRQIAPGQTGKIADYNYKLPDDFTGCVIAWNSNNLDSKVGGNYNYLYRLFRKSNLKPFERDISTEIYQAGSTPCNGVEGFNCYFPLQSYGFQPTNGVGYQPYRVVVLSFELLHAPATVCGPKKSTNLVKNKCVNFNFNGLTGTGVLTESNKKFLPFQQFGRDIADTTDAVRDPQTLEILDITPCSFGGVSVITPGTNTSNQVAVLYQDVNCTEVPVAIHADQLTPTWRVYSTGSNVFQTRAGCLIGAEHVNNSYECDIPIGAGICASYQTQTNSPGSASSVASQSIIAYTMSLGAENSVAYSNNSIAIPTNFTISVTTEILPVSMTKTSVDCTMYICGDSTECSNLLLQYGSFCTQLNRALTGIAVEQDKNTQEVFAQVKQIYKTPPIKDFGGFNFSQILPDPSKPSKRSFIEDLLFNKVTLADAGFIKQYGDCLGDIAARDLICAQKFNGLTVLPPLLTDEMIAQYTSALLAGTITSGWTFGAGAALQIPFAMQMAYRFNGIGVTQNVLYENQKLIANQFNSAIGKIQDSLSSTASALGKLQDVVNQNAQALNTLVKQLSSNFGAISSVLNDILSRLDPPEAEVQIDRLITGRLQSLQTYVTQQLIRAAEIRASANLAATKMSECVLGQSKRVDFCGKGYHLMSFPQSAPHGVVFLHVTYVPAQEKNFTTAPAICHDGKAHFPREGVFVSNGTHWFVTQRNFYEPQIITTDNTFVSGNCDVVIGIVNNTVYDPLQPELDSFKEELDKYFKNHTSPDVDLGDISGINASVVNIQKEIDRLNEVAKNLNESLIDLQELGKYEQYIKWPWYIWLGFIAGLIAIVMVTIMLCCMTSCCSCLKGCCSCGSCCKFDEDDSEPVLKGVKLHYT

SEQ ID NO: 35 - protein, 1258 aa, synthetic construct
MFVFLVLLPLVSSQCVNLTTRTQLPPAYTNSFTRGVYYPDKVFRSSVLHSTQDLFLPFFSNVTWFHAIHVSGTNGTKRFDNPVLPFNDGVYFASTEKSNIIRGWIFGTTLDSKTQSLLIVNNATNVVIKVCEFQFCNDPFLGVYYHKNNKSWMESEFRVYSSANNCTFEYVSQPFLMDLEGKQGNFKNLREFVFKNIDGYFKIYSKHTPINLVRDLPQGFSALEPLVDLPIGINITRFQTLLALHRSYLTPGDSSSGWTAGAAAYYVGYLQPRTFLLKYNENGTITDAVDCALDPLSETKCTLKSFTVEKGIYQTSNFRVQPTESIVRFPNITNLCPFGEVFNATRFASVYAWNRKRISNCVADYSVLYNSASFSTFKCYGVSPTKLNDLCFTNVYADSFVIRGDEVRQIAPGQTGKIADYNYKLPDDFTGCVIAWNSNNLDSKVGGNYNYLYRLFRKSNLKPFERDISTEIYQAGSTPCNGVEGFNCYFPLQSYGFQPTNGVGYQPYRVVVLSFELLHAPATVCGPKKSTNLVKNKCVNFNFNGLTGTGVLTESNKKFLPFQQFGRDIADTTDAVRDPQTLEILDITPCSFGGVSVITPGTNTSNQVAVLYQDVNCTEVPVAIHADQLTPTWRVYSTGSNVFQTRAGCLIGAEHVNNSYECDIPIGAGICASYQTQTNSPRRARSVASQSIIAYTMSLGAENSVAYSNNSIAIPTNFTISVTTEILPVSMTKTSVDCTMYICGDSTECSNLLLQYGSFCTQLNRALTGIAVEQDKNTQEVFAQVKQIYKTPPIKDFGGFNFSQILPDPSKPSKRSFIEDLLFNKVTLADAGFIKQYGDCLGDIAARDLICAQKFNGLTVLPPLLTDEMIAQYTSALLAGTITSGWTFGAGAALQIPFAMQMAYRFNGIGVTQNVLYENQKLIANQFNSAIGKIQDSLSSTASALGKLQDVVNQNAQALNTLVKQLSSNFGAISSVLNDILSRLDKVEAEVQIDRLITGRLQSLQTYVTQQLIRAAEIRASANLAATKMSECVLGQSKRVDFCGKGYHLMSFPQSAPHGVVFLHVTYVPAQEKNFTTAPAICHDGKAHFPREGVFVSNGTHWFVTQRNFYEPQIITTDNTFVSGNCDVVIGIVNNTVYDPLQPELDSFKEELDKYFKNHTSPDVDLGDISGINASVVNIQKEIDRLNEVAKNLNESLIDLQELGKYEQYIKWILTTLLFVVMLIIIMAVIGFILYKVLKMIRDNKLKSKSTPGLTVLS

SEQ ID NO: 36 - protein, 1271 aa, synthetic construct
MFVFLVLLPLVSSQCVNLRTRTQLPPAYTNSFTRGVYYPDKVFRSSVLHSTQDLFLPFFSNVTWFHAIHVSGTNGTKRFDNPVLPFNDGVYFASTEKSNIIRGWIFGTTLDSKTQSLLIVNNATNVVIKVCEFQFCNDPFLGVYYHKNNKSWMESGVYSSANNCTFEYVSQPFLMDLEGKQGNFKNLREFVFKNIDGYFKIYSKHTPINLVRDLPQGFSALEPLVDLPIGINITRFQTLLALHRSYLTPGDSSSGWTAGAAAYYVGYLQPRTFLLKYNENGTITDAVDCALDPLSETKCTLKSFTVEKGIYQTSNFRVQPTESIVRFPNITNLCPFGEVFNATRFASVYAWNRKRISNCVADYSVLYNSASFSTFKCYGVSPTKLNDLCFTNVYADSFVIRGDEVRQIAPGQTGKIADYNYKLPDDFTGCVIAWNSNNLDSKVGGNYNYRYRLFRKSNLKPFERDISTEIYQAGSKPCNGVEGFNCYFPLQSYGFQPTNGVGYQPYRVVVLSFELLHAPATVCGPKKSTNLVKNKCVNFNFNGLTGTGVLTESNKKFLPFQQFGRDIADTTDAVRDPQTLEILDITPCSFGGVSVITPGTNTSNQVAVLYQGVNCTEVPVAIHADQLTPTWRVYSTGSNVFQTRAGCLIGAEHVNNSYECDIPIGAGICASYQTQTNSRGSASSVASQSIIAYTMSLGAENSVAYSNNSIAIPTNFTISVTTEILPVSMTKTSVDCTMYICGDSTECSNLLLQYGSFCTQLNRALTGIAVEQDKNTQEVFAQVKQIYKTPPIKDFGGFNFSQILPDPSKPSKRSPIEDLLFNKVTLADAGFIKQYGDCLGDIAARDLICAQKFNGLTVLPPLLTDEMIAQYTSALLAGTITSGWTFGAGPALQIPFPMQMAYRFNGIGVTQNVLYENQKLIANQFNSAIGKIQDSLSSTPSALGKLQNVVNQNAQALNTLVKQLSSNFGAISSVLNDILSRLDPPEAEVQIDRLITGRLQSLQTYVTQQLIRAAEIRASANLAATKMSECVLGQSKRVDFCGKGYHLMSFPQSAPHGVVFLHVTYVPAQEKNFTTAPAICHDGKAHFPREGVFVSNGTHWFVTQRNFYEPQIITTDNTFVSGNCDVVIGIVNNTVYDPLQPELDSFKEELDKYFKNHTSPDVDLGDISGINASVVNIQKEIDRLNEVAKNLNESLIDLQELGKYEQYIKWPWYIWLGFIAGLIAIVMVTIMLCCMTSCCSCLKGCCSCGSCCKFDEDDSEPVLKGVKLHYT

SEQ ID NO: 37 - protein, 1270 aa, synthetic construct
MFVFLVLLPLVSSQCVNLTTRTQLPPAYTNSFTRGVYYPDKVFRSSVLHSTQDLFLPFFSNVTWFHVISGTNGTKRFDNPVLPFNDGVYFASIEKSNIIRGWIFGTTLDSKTQSLLIVNNATNVVIKVCEFQFCNDPFLDHKNNKSWMESEFRVYSSANNCTFEYVSQPFLMDLEGKQGNFKNLREFVFKNIDGYFKIYSKHTPIIVREPEDLPQGFSALEPLVDLPIGINITRFQTLLALHRSYLTPGDSSSGWTAGAAAYYVGYLQPRTFLLKYNENGTITDAVDCALDPLSETKCTLKSFTVEKGIYQTSNFRVQPTESIVRFPNITNLCPFDEVFNATRFASVYAWNRKRISNCVADYSVLYNLAPFFTFKCYGVSPTKLNDLCFTNVYADSFVIRGDEVRQIAPGQTGNIADYNYKLPDDFTGCVIAWNSNKLDSKVSGNYNYLYRLFRKSNLKPFERDISTEIYQAGNKPCNGVAGFNCYFPLRSYSFRPTYGVGHQPYRVVVLSFELLHAPATVCGPKKSTNLVKNKCVNFNFNGLKGTGVLTESNKKFLPFQQFGRDIADTTDAVRDPQTLEILDITPCSFGGVSVITPGTNTSNQVAVLYQGVNCTEVPVAIHADQLTPTWRVYSTGSNVFQTRAGCLIGAEYVNNSYECDIPIGAGICASYQTQTKSHGSASSVASQSIIAYTMSLGAENSVAYSNNSIAIPTNFTISVTTEILPVSMTKTSVDCTMYICGDSTECSNLLLQYGSFCTQLKRALTGIAVEQDKNTQEVFAQVKQIYKTPPIKYFGGFNFSQILPDPSKPSKRSPIEDLLFNKVTLADAGFIKQYGDCLGDIAARDLICAQKFKGLTVLPPLLTDEMIAQYTSALLAGTITSGWTFGAGPALQIPFPMQMAYRFNGIGVTQNVLYENQKLIANQFNSAIGKIQDSLSSTPSALGKLQDVVNHNAQALNTLVKQLSSKFGAISSVLNDIFSRLDPPEAEVQIDRLITGRLQSLQTYVTQQLIRAAEIRASANLAATKMSECVLGQSKRVDFCGKGYHLMSFPQSAPHGVVFLHVTYVPAQEKNFTTAPAICHDGKAHFPREGVFVSNGTHWFVTQRNFYEPQIITTDNTFVSGNCDVVIGIVNNTVYDPLQPELDSFKEELDKYFKNHTSPDVDLGDISGINASVVNIQKEIDRLNEVAKNLNESLIDLQELGKYEQYIKWPWYIWLGFIAGLIAIVMVTIMLCCMTSCCSCLKGCCSCGSCCKFDEDDSEPVLKGVKLHYT

SEQ ID NO: 38 - protein, 1271 aa, synthetic construct
MFVFLVLLPLVSSQCVNLTTRTQLPPAYTNSFTRGVYYPDKVFRSSVLHSTQDLFLPFFSNVTWFHAISGTNGTKRFDNPVLPFNDGVYFASTEKSNIIRGWIFGTTLDSKTQSLLIVNNATNVVIKVCEFQFCNDPFLDVYYHKNNKSWMESEFRVYSSANNCTFEYVSQPFLMDLEGKQGNFKNLREFVFKNIDGYFKIYSKHTPINLGRDLPQGFSALEPLVDLPIGINITRFQTLLALHRSYLTPGDSSSGWTAGAAAYYVGYLQPRTFLLKYNENGTITDAVDCALDPLSETKCTLKSFTVEKGIYQTSNFRVQPTESIVRFPNITNLCPFDEVFNATRFASVYAWNRKRISNCVADYSVLYNFAPFFAFKCYGVSPTKLNDLCFTNVYADSFVIRGNEVSQIAPGQTGNIADYNYKLPDDFTGCVIAWNSNKLDSKVGGNYNYRYRLFRKSNLKPFERDISTEIYQAGNKPCNGVAGVNCYFPLQSYGFRPTYGVGHQPYRVVVLSFELLHAPATVCGPKKSTNLVKNKCVNFNFNGLTGTGVLTESNKKFLPFQQFGRDIADTTDAVRDPQTLEILDITPCSFGGVSVITPGTNTSNQVAVLYQGVNCTEVPVAIHADQLTPTWRVYSTGSNVFQTRAGCLIGAEYVNNSYECDIPIGAGICASYQTQTKSHGSASSVASQSIIAYTMSLGAENSVAYSNNSIAIPTNFTISVTTEILPVSMTKTSVDCTMYICGDSTECSNLLLQYGSFCTQLKRALTGIAVEQDKNTQEVFAQVKQIYKTPPIKYFGGFNFSQILPDPSKPSKRSFIEDLLFNKVTLADAGFIKQYGDCLGDIAARDLICAQKFNGLTVLPPLLTDEMIAQYTSALLAGTITSGWTFGAGAALQIPFAMQMAYRFNGIGVTQNVLYENQKLIANQFNSAIGKIQDSLSSTASALGKLQDVVNHNAQALNTLVKQLSSKFGAISSVLNDILSRLDPPEAEVQIDRLITGRLQSLQTYVTQQLIRAAEIRASANLAATKMSECVLGQSKRVDFCGKGYHLMSFPQSAPHGVVFLHVTYVPAQEKNFTTAPAICHDGKAHFPREGVFVSNGTHWFVTQRNFYEPQIITTDNTFVSGNCDVVIGIVNNTVYDPLQPELDSFKEELDKYFKNHTSPDVDLGDISGINASVVNIQKEIDRLNEVAKNLNESLIDLQELGKYEQYIKWPWYIWLGFIAGLIAIVMVTIMLCCMTSCCSCLKGCCSCGSCCKFDEDDSEPVLKGVKLHYT

SEQ ID NO: 39 - protein, 1273 aa, synthetic construct
MFVFLVLLPLVSSQCVNLTTRTQLPPAYTNSFTRGVYYPDKVFRSSVLHSTQDLFLPFFSNVTWFHAIHVSGTNGTKRFDNPVLPFNDGVYFASTEKSNIIRGWIFGTTLDSKTQSLLIVNNATNVVIKVCEFQFCNDPFLGVYYHKNNKSWMESEFRVYSSANNCTFEYVSQPFLMDLEGKQGNFKNLREFVFKNIDGYFKIYSKHTPINLVRDLPQGFSALEPLVDLPIGINITRFQTLLALHRSYLTPGDSSSGWTAGAAAYYVGYLQPRTFLLKYNENGTITDAVDCALDPLSETKCTLKSFTVEKGIYQTSNFRVQPTESIVRFPNITNLCPFGEVFNATRFASVYAWNRKRISNCVADYSVLYNSASFSTFKCYGVSPTKLNDLCFTNVYADSFVIRGDEVRQIAPGQTGKIADYNYKLPDDFTGCVIAWNSNNLDSKVGGNYNYLYRLFRKSNLKPFERDISTEIYQAGSTPCNGVEGFNCYFPLQSYGFQPTNGVGYQPYRVVVLSFELLHAPATVCGPKKSTNLVKNKCVNFNFNGLTGTGVLTESNKKFLPFQQFGRDIADTTDAVRDPQTLEILDITPCSFGGVSVITPGTNTSNQVAVLYQDVNCTEVPVAIHADQLTPTWRVYSTGSNVFQTRAGCLIGAEHVNNSYECDIPIGAGICASYQTQTNSPGSASSVASQSIIAYTMSLGAENSVAYSNNSIAIPTNFTISVTTEILPVSMTKTSVDCTMYICGDSTECSNLLLQYGSFCTQLNRALTGIAVEQDKNTQEVFAQVKQIYKTPPIKDFGGFNFSQILPDPSKPSKRSPIEDLLFNKVTLADAGFIKQYGDCLGDIAARDLICAQKFNGLTVLPPLLTDEMIAQYTSALLAGTITSGWTFGAGPALQIPFPMQMAYRFNGIGVTQNVLYENQKLIANQFNSAIGKIQDSLSSTPSALGKLQDVVNQNAQALNTLVKQLSSNFGAISSVLNDILSRLDPPEAEVQIDRLITGRLQSLQTYVTQQLIRAAEIRASANLAATKMSECVLGQSKRVDFCGKGYHLMSFPQSAPHGVVFLHVTYVPAQEKNFTTAPAICHDGKAHFPREGVFVSNGTHWFVTQRNFYEPQIITTDNTFVSGNCDVVIGIVNNTVYDPLQPELDSFKEELDKYFKNHTSPDVDLGDISGINASVVNIQKEIDRLNEVAKNLNESLIDLQELGKYEQYIKWPWYIWLGFIAGLIAIVMVTIMLCCMTSCCSCLKGCCSCGSCCKFDEDDSEPVLKGVKLHYT

SEQ ID NO: 40 - DNA, 23 bp, synthetic construct
  source 1..23: mol_type = other DNA
cgatctcttgtagatctgttctc

SEQ ID NO: 41 - DNA, 22 bp, synthetic construct
  source 1..22: mol_type = other DNA
atattgcagcagtacgcacaca

SEQ ID NO: 42 - DNA, 26 bp, synthetic construct
  source 1..26: mol_type = other DNA
acactagccatccttactgcgcttcg

SEQ ID NO: 43 - DNA, 20 bp, synthetic construct
  source 1..20: mol_type = other DNA
gaccccaaaatcagcgaaat

SEQ ID NO: 44 - DNA, 24 bp, synthetic construct
  source 1..24: mol_type = other DNA
tctggttactgccagttgaatctg

SEQ ID NO: 45 - DNA, 24 bp, synthetic construct
  source 1..24: mol_type = other DNA
accccgcattacgtttggtggacc

SEQ ID NO: 46 - DNA, 13 bp, synthetic construct
  source 1..13: mol_type = other DNA
agttagataaata

SEQ ID NO: 47 - DNA, 12 bp, synthetic construct
  source 1..12: mol_type = other DNA
agtatataaaat

SEQ ID NO: 48 - DNA, 13 bp, synthetic construct
  source 1..13: mol_type = other DNA
agttggataagta

SEQ ID NO: 49 - DNA, 12 bp, synthetic construct
  source 1..12: mol_type = other DNA
agtacatcaagt

SEQ ID NO: 50 - DNA, 18750 bp, synthetic construct
  source 1..18750: mol_type = other DNA
acgcgaaaaaatgcataacaaaactatcaacctgaaaaaagttaggacaagtgaagattgctagtcccaaagaccagaatcatgggctgtaatgtgatgatggagcttgattatggtggacgagctgcatggctggcattccacataaccaactttgataggtcagatttggaaactatcctaagaggtgctagggtgtgcaatacatggcaagatcagagactctccgtgtaccttgtgggaagggattgcaatttgttaagaccatttgtgcaagctgccaaatttatccataatactaggagaggccaaacattaacacattggttcacaaaaaatatcgtgtttagttctacagggcaagagacagagcctcccattgaccccacatgtgagctgttggtagagctgatcagtggttaagatgacagcacattatgtagttaattaaaacaaagggtaggacaagtcctaatgtccacagctatgaacaagttcactcagaccatctctaaacctgccactatcttgaatatttcagacagtgaagagtcgggcgatgaggcaggggtgggcaaggtgtcccgtaccacacagagctcagagaggtggcttgatttgctcattgaaaagttccagccgagcctacaaaacatcactagatacatcaactggaacttcatcaggatctgcaatgataggcttaaaaaagaaaaaatggggtacattgaggccaagcaatatgtggaagacatggcttggatggtgatagcatctgaggcagacagcattgagtggaagtgcataaggaggcaggagaaagtgactggggtgaaatacccaaagttcttctttgtacaacacaaagaggactggattgagtgcacaggatgcattccgtacccaggccatgacttgatctatgatgaggatgatgatgactgagctgactcagatcactccaaccagcagagagatccatagttatagaaaaacattaggataaatacacatcctaggccgccaccatgttcgtgtttctggtgctgctgcctctggtgagctcccagtgcgtgaacctgatcacaaggacccagtcctataccaattccttcacacggggcgtgtactatcccgacaaggtgtttagatctagcgtgctgcactccacacaggatctgtttctgcctttcttttctaacgtgacctggttccacgccatccacgtgagcggcaccaatggcacaaagcggttcgacaatccagctctgccctttaacgatggcgtgtacttcgcctccaccgagaagtctaacatcatcagaggctggatctttggcaccacactggacagcaagacacagtccctgctgatcgtgaacaatgccaccaacgtggtcatcaaggtgtgcgagttccagttttgtaatgatccattcctggacgtgtatcagaagaacaataagtcttggatggagagcgagtttcgcgtgtattcctctgccaacaattgcacatttgagtacgtgtcccagcccttcctgatggacctggagggcaaggagggcaatttcaagaacctgagggagttcgtgtttaagaatatcgatggctacttcaagatctactccaagcacaccccaatcaacctggagcgcgacctgccacagggcttctctgccctggagccactggtggatctgcccatcggcatcaacatcacccggtttcagacactgctggccctgcacagaagctacctgacaccagtcgacagctcctctggatggaccgcaggagctgccgcctactatgtgggctatctgcagcccaggaccttcctgctgaagtacaacgagaatggcaccatcacagacgccgtggattgcgccctggatcccctgtctgagaccaagtgtacactgaagagctttaccgtggagaagggcatctatcagacaagcaatttcagggtgcagcctaccgagtccatcgtgcgctttcccaatatcacaaacctgtgcccttttcacgaggtgttcaacgcaaccaccttcgccagcgtgtacgcctggaataggaagcgcatctccaactgcgtggccgactattctgtgatctacaactttgctccattcttcgcctttaagtgctatggcgtgagccccacaaagctgaatgacctgtgctttaccaacgtgtacgccgattccttcgtgatcaggggcaacgaggtgagccagatcgcccctggccagacaggcaacatcgccgactacaattataagctgcctgacgatttcaccggctgcgtgatcgcctggaactctaacaagctggatagcaaaccgagcggcaactacaattatctgtaccggctgtttagaaagtctaagctgaagccattcgagagggacatctccacagagatctaccaggccggcaacaagccctgcaatggcgtggctggccctaactgttattcccctctgcagagctacggcttcaggccaacatacggcgtgggacatcagccctaccgcgtggtggtgctgtcttttgagctgctgcacgcacctgcaacagtgtgcggaccaaagaagagcaccaatctggtgaagaacaagtgcgtgaacttcaacttcaacggactgaccggcacaggcgtgctgaccgagtccaacaagaagttcctgccttttcagcagttcggcagggacatcgcagataccacagacgccgtgcgcgaccctcagaccctggagatcctggatatcacaccatgctccttcggcggcgtgtctgtgatcacaccaggcaccaatacaagcaaccaggtggccgtgctgtatcagggcgtgaattgtaccgaggtgcccgtggcaatccacgcagatcagctgacccctacatggcgggtgtactctaccggcagcaacgtgttccagacaagagccggatgcctgatcggagccgagtacgtgaacaatagctatgagtgcgacatccctatcggcgccggcatctgtgcctcctaccagacccagacaaagtcccacgggtctgcctcctctgtggccagccagtccatcatcgcctataccatgagcctgggcgccgagaattccgtggcctactccaacaattctatcgccatccctaccaacttcacaatctccgtgaccacagagatcctgccagtgagcatgaccaagacatccgtggactgcacaatgtatatctgtggcgattccaccgagtgctctaacctgctgctgcagtacggctctttttgtacccagctgaagagagccctgacaggcatcgccgtggagcaggacaagaacacacaggaggtgttcgcccaggtgaagcagatctacaagaccccacccatcaagtactttggcggcttcaacttcagccagatcctgcccgatcctagcaagccatccaagcggtcttttatcgaggacctgctgttcaacaaggtgaccctggccgatgccggcttcatcaagcagtatggcgattgcctgggcgacatcgccgccagagacctgatctgtgcccagaagtttaatggcctgaccgtgctgcctccactgctgacagatgagatgatcgcccagtacacatctgccctgctggccggcaccatcacaagcggatggaccttcggcgcaggagccgccctgcagatcccctttgccatgcagatggcctatcggttcaacggcatcggcgtgacccagaatgtgctgtacgagaaccagaagctgatcgccaatcagtttaactccgccatcggcaagatccaggactctctgagctccacagccagcgccctgggcaagctgcaggatgtggtgaatcacaacgcccaggccctgaataccctggtgaagcagctgtctagcaagttcggcgccatctcctctgtgctgaatgatatcctgagcaggctggaccctccagaggcagaggtgcagatcgaccggctgatcacaggcagactgcagtccctgcagacctacgtgacacagcagctgatcagggcagcagagatcagggcctctgccaatctggccgccaccaagatgagcgagtgcgtgctgggccagtccaagagagtggacttttgtggcaagggctatcacctgatgagcttcccacagtccgcccctcacggagtggtgtttctgcacgtgacctacgtgccagcccaggagaagaacttcaccacagcaccagcaatctgccacgatggcaaggcacactttcctagggagggcgtgttcgtgagcaacggcacccactggtttgtgacacagcgcaatttctacgagccacagatcatcaccacagacaatacattcgtgtccggcaactgtgacgtggtcatcggcatcgtgaacaataccgtgtatgatcctctgcagccagagctggactcttttaaggaggagctggataagtacttcaagaatcacaccagccccgacgtggatctgggcgacatctctggcatcaatgccagcgtggtgaacatccagaaggagatcgacaggctgaacgaggtggccaagaatctgaacgagtccctgatcgatctgcaggagctgggcaagtatgagcagtacatcaagtggccctggtatatctggctgggcttcatcgccggcctgatcgccatcgtgatggtgaccatcatgctgtgctgtatgacaagctgctgttcctgcctgaagggctgctgttcttgtggcagctgctgtaagtttgatgaggacgatagcgagcctgtgctgaagggcgtgaagctgcactacacctgatagccacctatagcaagtgatgtagtatttagtctatgattagttatagaaaaacattaggataaatacacatcctaggccgggccaaaatgtctctagacagattgaagctcaatgatgtctcaaacaaggatagcctgctgtccaactgcaaatacagtgttaccagatccacaggcgatgtaaccagtgtgtctggtcatgctatgcagaaagcccttgcaaggacactcggcatgttcttacttactgccttcaaccgttgcgaagaagtggcagaaatagggctccaatatgccatgtccttgctaggcagagatgatagcatcaagatattaagagaagccggctacaatgtaaaatgtgtggacacacagctcaaggactttacaatcaaattacaaggaaaggaatacaaaatacaagtcctagatatagtgggaatagatgcagccaatttagctgatctagagatacaagccagaggagtggtagcaaaagaactcaaaacaggagccaggctacctgacaatcggaggcatgatgcaccagattgtggtgtgatagttctctgtattgcagcattagttgtttccaaattagctgcaggggacaggggaggacttgatgctgtggaaagaagggctttaaatgtgctgaaagccgagaaagccaggtaccccaacatggaggtcaagcagatagctgaaagtttttatgatctgtttgaaaggaagccttattacattgatgtcttcatcacttttggcctggcccagtctagtgtcaagggaggcagcaaagttgaggggctgttttcaggtctcttcatgaatgcatacggggcaggacaagttatgctgaggtggggtttactggcaaaatctgtcaagaacatcatgctaggccatgctagtgtacaagctgagatggaacaggtggttgaggtttacgaatatgctcagaagcaaggaggggaggcaggattctatcacatcagaaataatccaaaagcttcacttctctctttgaccaattgtcctaatttcaccagtgttgtgcttggcaatgctgcaggtttaggcatcatagggtcatataagggtgctcctaggaatagagaactctttgatgctgccaaagattatgcagaaagattaaaggacaacaatgtaattaactacagtgcattaaacttgactgcagaagaaagagagctgatcagccagcagctgaacattgttgatgacactcctgatgatgatatttaattaaaactggaaaatgtaggataaatatggagaaattcgcccccgaatttgttggcgaggatgctaacaagaaggcagaggagtttctcaaacatagatccttcccttcggaaaaaccactagctggtataccgaacactgccactcatgtcaccaaatataacatgccccctatattgcgtagctcattcaaactcccttccccgagagttgctgcaaatcttactgaaccctctgctccccctaccactccaccacccacacctccccagaacaaggaagagcagcccaaagagtctgatgttgacattgagactatgcatgtctgtaaggttcctgacaatccggaacacagcaagaagccatgctgctcagatgataccgatactaagaaaactaggaagccgatggtcacctttgtggaacccgaggagaaatttgtcggattgggagctagcttgtacagggagaccatgcagacctttgctgctgatggttatgatgaagaaagcaacctatcgtttgaggagactaaccaagagccgggttcttcatctgtagaacaaagactagatagaatagaggagaaattgtcctacataataggccttttaaacaccataatggtagcgactgctggacctaccactgctagagatgagattagagatgcccttataggcactagagaagaacttattgagatgatcaagtctgacatcttgactgtcaatgacagaatagtggccatggagaagctcagagatgaggaatgctccagagctgacactgatgatggatcagcctgttatttaacagacagagcaaggatactagataagatagtgtccagcaatgctgaagaggctaaggaagatttggatgttgatgacatcatgggcattaatttttagttaattaaaataacaacaggacaaataatggaggcctacttggtagagatgtaccatggtgtcccatatacagctgcagtacagctaaacttggttgaaaaacattcagccaacatatcactaactgtgtggataccgatgtttcaaacatctctaccaaagaactccgttatggacctgctacatgatgttacagtcatttgtacacagatatcaacagtgcatggtcccatgatcaaggtagatctgagctcttccaatgcaggtttagctaccatgccaaggcaattcttgataaatgctatcatagctttggatgactggggcaacatggattacgaagtgcctgttgcttttgataaaaagagcttctgtgtgacaattcttaagcctaaaaacatgctttacactgtacccagcattactcccactaatcgacctactcatgagctgatagctgtctgctctttccataacagggtaacattaaagtcattcaatatacctgtcttcatcagagcactgtctatcagacagcaggaccttgatagtgtggagcaggctataagctccgatgtggaccatgctataacaacagctagggtggctccctatgcagggcttacacttgtgatcaacatcacatccaccaaaggagcattcaaactgctaaaggcaggtagtcagattcttgcagaactgggtccctatctgacgcaggtgagcctacatgatgtgattatgaactggaaacatacaggcacttcctacatactcaagagctcctcaacaagtggatgaaaaagagaaagtcaccattgatcagctcaatccacaactacaaccccacgatttcacacagcacaacaaccaccgccaccaacatccacatgacaaccacacatacacacccacatacatatatacacatatcttagttaaataaaatcaggataaataatggatcctaacatgacctcacaccagatcaccctcgagatcaacatgaccagcagccgtattggcacatacactacaccagccccaacagctcttctccttgcatgtgccgtcatcaacacagtgtgtgcgctgataatggcctgcagcagtagaagcactgccacatcaggcattgtcagcagccaatgcacagttcatcccaatcaccctccaccaagttatggcgtcaatgtaactggtctgccgggtaacctatactcaaggaacactacataacattataaataacagaaattatccttcaataaaccccaggccagacagctttaccctgctagacgattcaatcagcccttgcagtatgtcgtctagttaacaaaaaaccggtaggataagtactatcctattggaaccaaacgagacctgtagagcagctcacacaagagaaccacaagctgacttcacctagtatgggaaggaacttagaagtgagtggcagcattaccaatttgaactttgagagaactcagcatcctgacacatttaggactgttgtaaaagtgaaccaaatgtgtaagcttattgcaggtgtgctcacaagtgctgctgtggcagtttgtgtgggggtcataatgtattctgttttcacatcaaaccacaaggccaactccacgcagaatgccacgacccggaacagcacatccacccctccccaaccaaccgccggtctgcccaccacagagcaagggaccatccccagattcaccaaaccccccaccaaaaccgccacccaccatgagatcacagagcccgtcaaaatggcaacaccttcagaggatccctaccaatgctccagcaatggttatttggaccgacctgatttacctgaaaatttcaaactcgtattggatgttatatgcaagcctccaggtcctgaacatcacaacaccagctgttatgagaaacgtgaaatcaacccaggaagtgtttgccctgatcttgtaacaatgaaggcaaacatgggcttaaacaatggtggtggggaggatgctgcaccttatatagaggttaccaccctttctacgtactccaacaaaagggcaatgtgtgtccacaatgggtgtgatcaaggcttctgtttcttcctttctggtttaagcactgatcaggagagagctgtgctagagcttggaggtcaacaggctatcatggagttgcattatgattcctactggaaacactattggagtaactctaattgtgttgttcccagaacaaactgcaacctgacagaccaaactgagattttgtttcctaggtttaacaacaagaatcagtctcagtgtaccacctgtgcagattcagctggcctagataacaaattttatctcacatgtgatgggcttttaagaaccctccctctagttggactacccagcctaagtcctcaggcttacaaagctgtacccacacaaactacaggcaccaccacggcaccaacatcagagacgaggcacccaacccctgcacccaggaggtccaaacctctcagtcggaagaagagagctttatgtggtgtagactcaagcagagaacccaaaccaacaatgccttactggtgtcctatgctccaattatttccaaggaggtctaattcttaagtgacctattcctgaattaacttcagaataagtaccaaccttatcagtagttaatgaaaactaagctttgatataataggacaaatatgattcctggcaggatctttctagtccttctggtgatcttcaacaccaagccaattcacccaaatacattaacagaaaaattctatgagtccacatgtagtgttgagactgcaggttataagagtgcccttagaacaggttggcatatgacagttatgtcaattaagttgtctcaaataaatattgagtcatgcaagagcagcaactcgttattggctcatgagcttgcaatctatagtagtgcagtggatgaattgagaacgttatcatccaatgccttgaagtccaaaaggaagaagaggttcctcggtttgattcttggtctcggagctgcagtcactgccggggtggctttagccaagacagtgcaacttgaaagtgagattgcattgattagagatgcagtgagaaatacaaatgaggctgttgttagcctaaccaacggcatgtcagtgttggctaaagtggtggatgatttgaaaaacttcatatctaaagaattactcccaaaaataaaccgagtctcttgtgatgtgcacgacatcactgccgtcattagattccaacagctcaacaaaagacttttggaagtatctcgtgaattttcatctaatgcaggattaacacacactgtttcatcttttatgttaacagaccgggaactcacctccattgtaggcggcatggctgtttcagcaggccaaaaagagataatgctatctagcaaagctataatgagaagaaatgggttagcaatattaagttcagtcaacgctgacacactggtttatgtaatacaactcccattatttggtgttatggacacagattgttgggtaataagaagttctatagactgtcataacatagcagacaagtatgcttgtttggctagagctgataatggctggtattgtcacaatgctggctcattatcatacttcccgtcgccaacggattgtgagatccacaatgggtatgctttctgtgacactctaaaaagtctaactgtacctgtaacatcacgagaatgcaactcaaacatgtataccactaactacgattgtaagatttccacaagtaaaacttatgtgagtacagcggtactgactacaatgggttgcttggtatcttgttatggtcataacagttgcacagtcatcaataatgacaaaggtataataaggactctgccagatggttgccactacatctccaacaaaggtgtggacagggttcaagtaggtaacactgtttactatcttagcaaagaagttggcaagtcaattgttgtcagaggggaaccattggtcttgaaatatgaccctttgagtttccctgacgataaatttgatgttgctataagagatgtggagcatagcatcaatcagacacgcacattcttgaaggcctctgatcagttattggacttaagtgaaaacagagagaataaaaatttaaacaagtcatatatactaacaactctgctcttcgttgtaatgcttattataataatggctgtcatagggttcattctgtataaggtattgaaaatgatcagagacaacaagttgaaatccaaaagtacacctggcctcacagttttatcatgacaattgtaccaaaccataattgagttagttaattaaaaacttaggataagtgacaatccagacccaacacctctttcaactctcaaggataaggtaggatgagtgtgagaccttgcaaatttgaggttcaagggttttgttccagagggaggaattgcaagtatagtcataaatattgggaatggcctttgaaaactcttatgctcaggcagaactacatgcttaataggatttataggttcctcgacaccaacacagatgcaatgtcagatgtcagcggatttgatgcaccacaaaggactgctgagtatgccttgggaaccataggtgtgctgaaaagttacctggaaaaaactaacaacatcactaaatcaatagcttgtggcagtttgatcactgtattgcagaacttggatgttggtctagtaatacaagcaagagatagcaacactgaggacaccaattacttgagaagttgcaacactatactgtcttatatagacaagatacacaagaagagacaaattattcacattctcaaaagactgccagtaggagtactatgcaatctgatccaatctgtcatctccatcgaggagaagataaattcttctatgaaaacagaatgataaggctgcctaaatactatccagccatactgcataagatgtatattattagagtaaatagaaacctcacttacgatgggtctggaccatccacaataatagatgcaggaaagtctgtggtgtggaatcgtgttgatgtgatagcttgtgtgaaagaggccttgtgctgcatagaattcagctggaataaccaagtgatcatagactttgattatagccaggccagatgatgtggactgtattcctttttttgtcagtaatcagttattaacccaaaattgttaattatgtagactttaagttaactaacttcatgttaattcaatagttatataaaaaaatattcgaattaggatcaatatggatcctattgatgaacaagaagttaatgtgtacttgccggatagctacttaaagggtgttatatcttttagtgaaactaatgctcttggcagctgtatcattggtagacctttcttgaaggatgactttactgccactacttcaatccgtaaccccctaattgaacataaaagaataagggacactaaattagtaaaaaatattgtttcaaaccctcaatataggttagtggagcctctccaaatgcagcatgagctcttgagtgtactatcgcccaatttcatattgcacactgccaacttaaggaaaattatacaaagaagtgttgacataacagataaaaagttgaaccccattttgcacattttgaatcttaattctcctaaccaagagggtaaggtgtcggaacggctaactaggctaattaagaaacatctctctcacatacctaattgggtaagcagctggtacaatatatgggtcaatcttaacaacttactgcaggagtaccgttcaaaggaagttatagaccataactgtgttctgactaggcaattgtctggaagtttcatacatgtggtcatgagtcaatatggagttgtgataattagcaaaaaaagtaaaagatatacaatgtgtacttataaccaattcctaacctggaaggaccttgccttgagcagatttaatgccaattatgtggtctggctaagtaatgtgttaaacacactcaacgaggggttgggattaaggtgtagattaaaaggtcatctgctcagtaagttgtacatttccactgacatctttttatcttcaacatctaatgaattttataatgtggtcaaggaatttgagggcttcatcatgtcactgatattgaaacaaactgaggaagccttatttagcacaaggttttataataacatgttgaacaacttaattgatgccattgatagggctcgactagagtatctggcccgctgtgccaattcagctgccaggattaatttacctagtacagatgttatgatagcatcattgggtgatatcttatctttgataaacgttttaggtgaatccaaccttaacaacttaagtgagttatattttatcttcaggatatttggtcaccctatggttgatgagaggaaggccatggatgcagtcagagataactgttgtgaaacaaagtttctgacggctaagaaccttgcatcgttaagaggagcatatgtttatagaattatcaaaggattcgtagcaaattataacaggtggccttacataaaaactagagtttgccttacaccaacatggattaactatcttgacaccaattcatgtccctcattattagagatgacagaagatgattttattgtgttagctggagtgcactttataagagaattccacatcccaaagctaactgatctggagattatattaaatgacaaggccatatctcctccaaaatcactcatttggtcatgctttccaaaaaactacatacctcaggttatacaagatgagtatgcccggaggtattgtagagctaaagcacctttgaagacaagacgtgtcttggagttctacttacaggacaaggatttcaagttggatcagctccatagagtagtagtgaaccaggactaccttaatgataaagaacatataatttctttaacaggaaaagaaagagagttgggtgttggtaggatgtttgccatgcaacctgggaagcagaggcaagtccaaattttagcagagaagctgttggctgataacatcctgcaattctttccggagacactgactagatacggtgatttggagctgcaaaagatactagagttaaaagctggactttcaaataaaaatgacagatctaaagactcctacaataattatataagtaggtgctcattaattactgatttaagtaaatttaaccaagcttttaggtacgagtcatcctgtgtgtgtagtgatcttttagatgagctacatgggactcaaagcttattctcttggctgcatttaacagtaccactgactactataatgtgtacatataggcatgcgccgccggacactggaaacaactataatgtagatgatattgctgagcagagtggactctaccgctaccacatgggcgggattgagggctggtgccagaagctctggacaacagaggccattgctttgctagatactgtagctgtgaagggccgtttccagctaacttcattaataaatggcgacaaccaaagtattgatatttcaaaaccaacaaggctggggaccaggactcaaagtgaagcagattatgatttggcaataaattctttaagattaatatcagcagcttataaaggcattggacataaattaaaagaaggtgagacctacttgtcacgtgacatgcagttcatgagtaaaacaatacaacatgaaggggtctactacccggcctccatcaagaaaatattaagagttggtccctggatcaacacaatattagatgatataaaaacttcaacagaaagtattggttctctaactcaagaactagaatataaaggtgaaagtttaatgagcagcctgctgctgaggaacttctggctctacagattatattcagtggatttaaaagatcattctttgtgtggaaagcagctctacagatccttaataaaagtgttaaaacatttgaagaggtgcttcaacctggagaaccttggggaatgtttggaattatttttaaatgtgcccatgcagtttggaggtgctgacccaaatgtcatctacaggagcttctacagaagaactccagattttctaacagaaagtataactcatctcatcctcattttaaaacattttagaagagatttggaattcaacaaagataatgtctccaaagctgttctttctttgctagagttcaccaagaatgattctgcagaatttgtaactttgatgagagatcctcaagcaattggtagtgagaggcaggccaagatcacttcagacatcaacagaacagctgtaacttcagtgttatcaaatgctccaaatgaaatatttagaacttcagctcttcattacagcagcacagaaaatgaattaaatggaatagcaagtggagtttctcctgtttatcctcatggtcttcgagttttatatgaaagtttacctttttataaagcagagaagattgtcaacatggtttctgggaccaagtccatcaccaacatactggagaagacatcagccatctcctacacagatataattcgagccaccaacatgatggtggagaacctcactttgctaacaagaataatgaaaccaggtgctgacacatctttggatcctgacacaatagtaataacaatattatcaaaaataataagagataaatcctgggatgttggtgatataattggtgtcacttccccatctcctgtctcctgcttcaaggtggtctacacatcaactctacaaaataattcagtagtaatagaaagatacacaacagacacctacacaagaggtaagagaggccccaccaagccctgggtgggcagcagcacacaggagaagaagtccatgcctgtctacaacagacaagttttaacaagaggacaaagagatcaaatagaaaatatagcaaagctggagtgggtgttttcttcagtagcaaatattgattctttgctaaatgagctcagcaccatgactttgggtctttctctaaggaaatgtagacaactttttccaacatatttaagtttaaacttcctgcacaggctttctgtcagcagcaggcccagagaatatccttcttctcttcctgcctacaggacaacaaattttcattttgatactggaccaataaataaagtgttaacagaaagatttggagatgaagatataaatttggtatttcaaaatgcaatatcatatggtctttccaccatgtctttggtggagcagtttactggtgtctgtccaaataaagttttgctggtgcccaagctacaagaaatacaactaatgaaagttccaatatttcaaggtggcttcaacctacaaagtataattccaataataaggcagcagcacatgttcctgcccaaccacatcactccagcccagtatattgaattatttctttcttcaaaacaatttcattcaagaataaatttaaaacacaacaacagatttaaacttgttttacaaaaagattattttaatggggagaacatgatagaaactttgtccacctgtttggcaggccactggatcatcattttgatgctaatgaaggagagtcaggggatatttgacaaggagtggtatgatggttttgtaacagaccacatgttcctggacctgcagctcttcctctcctccttcaagacatttctaactgtcttcaactttgcttatttaaaagttggttcaaatatagaagaaataacaggaaatcaagccaacctgctggagctgctggacctgggctactggaagaacatgtataaagtattttcagagaccaaggtgcggctggctttgctaaaacaagatttatcatttaattctgtgaagaacagcagcagcttccggcactggtttataaattctctacaagaagtacaatgtacttctgtgccttgggtggtaaatgtaacaagaaatccaactcatttaaaaggtgttctacagtacatgaagatgatagaaagtggcatgattcaaggttattcagcaaatatttcttcagttttaagtatcccatataattatccagacatggcgcacatgatgacaaaaataataagaaatcgaggccacatgtcctatgattatccaaagatgaagaaaagtttaactttctccatgacagacatgagtgacagctacatgctcaacctcttccccaaagtagaatgttcttacatgagtggttatttggataaactagatgatactctacaacttctaaagaaacctcctgttggaagaaaagttccttctgtggctttgccctggcaccactgcaacagatacaactttgtcttcagcagcacaggctgcaaagtttctgtcattgacatgcttccaaaacatttccgaagaagtaatttaaaagtaatatgttttattggagaaggggcgggcaacctcatgctaagagctgttttggaagttggtggaaatataaaattaatatatagatccttaaaagatcctgatgatcatcatgttcctgtagaatttctaagattaaaaccttgttatccttatattgatactggtggcagtttatctttggcttcaacagatgccaccaacaaggcccactgggattatttacatcttcactggacagatcctttaaatttaatagtatgtgatgcagaaataagtggtgtgaagcactggctaaaaattcttcacaggtggtatgagcacatgacttcctgcaagcactgtttaaaatcagaacatgataaatatttaataataaaatatcatgctcaagatgatttaatagatcttcctcatggtgtcaggctactaaaatgtaacatctgcctgggctccaaactaagtggcagtgagagctacctgctcattggtcttggtctttcaaataaacttcctgtctacagtgaagttcttcattcaaaacttcttttggcagaatgtcatcagtttcatcatccaaaatatttggatgtttctggaataaatacaaatataaaatccttaataccaatgttggattatccaataacttacaacaagatcaccactttgctagaaagtgtgcgggagctttcttcaaataaaaacaagaacaccatgtggattggaagaaatcctgtctaccataataaatggctaaagaggaaatatttcaacattttaaaatggctaaaatactgtatagaacttcctgccttcaggatggattataattcatttgagagaatagaaatgctttatccaaatttaagagatttggtagattctgtttctacttcagagctgaagaaagtaataaaagtaacaggcatcctcttcaggagcaacaccatgtgaattaatatgccaatgctaacatgtcatccccactactttttttgttcaatcactctcagtctagacatgtgagaagatcccaaacccaactgcacccctcccactcgaaatcagttgtagcctcagcagctccatctgccatgatctctgaccagcagcaaatgtattattattttaatttgtctatagttaacaaaaaattgatatctcacaggttgtaaacatagttcttttataattattgttagttaaactattgtgtttgacttcctttgggtatttttttcccgt

SEQ ID NO: 51 - DNA, 21742 bp, synthetic construct
  source 1..21742: mol_type = other DNA
acgcgaaaaaatgcataacaaaactatcaacctgaaaaaagttaggacaagtgaagattgctagtcccaaagaccagaatcatgggctgtaatgtgatgatggagcttgattatggtggacgagctgcatggctggcattccacataaccaactttgataggtcagatttggaaactatcctaagaggtgctagggtgtgcaatacatggcaagatcagagactctccgtgtaccttgtgggaagggattgcaatttgttaagaccatttgtgcaagctgccaaatttatccataatactaggagaggccaaacattaacacattggttcacaaaaaatatcgtgtttagttctacagggcaagagacagagcctcccattgaccccacatgtgagctgttggtagagctgatcagtggttaagatgacagcacattatgtagttaattaaaacaaagggtaggacaagtcctaatgtccacagctatgaacaagttcactcagaccatctctaaacctgccactatcttgaatatttcagacagtgaagagtcgggcgatgaggcaggggtgggcaaggtgtcccgtaccacacagagctcagagaggtggcttgatttgctcattgaaaagttccagccgagcctacaaaacatcactagatacatcaactggaacttcatcaggatctgcaatgataggcttaaaaaagaaaaaatggggtacattgaggccaagcaatatgtggaagacatggcttggatggtgatagcatctgaggcagacagcattgagtggaagtgcataaggaggcaggagaaagtgactggggtgaaatacccaaagttcttctttgtacaacacaaagaggactggattgagtgcacaggatgcattccgtacccaggccatgacttgatctatgatgaggatgatgatgactgagctgactcagatcactccaaccagcagagagatccatagttatagaaaaacattaggataaatacacatcctaggccgccaccatgttcgtgtttctggtgctgctgcctctggtgagctcccagtgcgtgaacctgatcacaaggacccagtcctataccaattccttcacacggggcgtgtactatcccgacaaggtgtttagatctagcgtgctgcactccacacaggatctgtttctgcctttcttttctaacgtgacctggttccacgccatccacgtgagcggcaccaatggcacaaagcggttcgacaatccagctctgccctttaacgatggcgtgtacttcgcctccaccgagaagtctaacatcatcagaggctggatctttggcaccacactggacagcaagacacagtccctgctgatcgtgaacaatgccaccaacgtggtcatcaaggtgtgcgagttccagttttgtaatgatccattcctggacgtgtatcagaagaacaataagtcttggatggagagcgagtttcgcgtgtattcctctgccaacaattgcacatttgagtacgtgtcccagcccttcctgatggacctggagggcaaggagggcaatttcaagaacctgagggagttcgtgtttaagaatatcgatggctacttcaagatctactccaagcacaccccaatcaacctggagcgcgacctgccacagggcttctctgccctggagccactggtggatctgcccatcggcatcaacatcacccggtttcagacactgctggccctgcacagaagctacctgacaccagtcgacagctcctctggatggaccgcaggagctgccgcctactatgtgggctatctgcagcccaggaccttcctgctgaagtacaacgagaatggcaccatcacagacgccgtggattgcgccctggatcccctgtctgagaccaagtgtacactgaagagctttaccgtggagaagggcatctatcagacaagcaatttcagggtgcagcctaccgagtccatcgtgcgctttcccaatatcacaaacctgtgcccttttcacgaggtgttcaacgcaaccaccttcgccagcgtgtacgcctggaataggaagcgcatctccaactgcgtggccgactattctgtgatctacaactttgctccattcttcgcctttaagtgctatggcgtgagccccacaaagctgaatgacctgtgctttaccaacgtgtacgccgattccttcgtgatcaggggcaacgaggtgagccagatcgcccctggccagacaggcaacatcgccgactacaattataagctgcctgacgatttcaccggctgcgtgatcgcctggaactctaacaagctggatagcaaaccgagcggcaactacaattatctgtaccggctgtttagaaagtctaagctgaagccattcgagagggacatctccacagagatctaccaggccggcaacaagccctgcaatggcgtggctggccctaactgttattcccctctgcagagctacggcttcaggccaacatacggcgtgggacatcagccctaccgcgtggtggtgctgtcttttgagctgctgcacgcacctgcaacagtgtgcggaccaaagaagagcaccaatctggtgaagaacaagtgcgtgaacttcaacttcaacggactgaccggcacaggcgtgctgaccgagtccaacaagaagttcctgccttttcagcagttcggcagggacatcgcagataccacagacgccgtgcgcgaccctcagaccctggagatcctggatatcacaccatgctccttcggcggcgtgtctgtgatcacaccaggcaccaatacaagcaaccaggtggccgtgctgtatcagggcgtgaattgtaccgaggtgcccgtggcaatccacgcagatcagctgacccctacatggcgggtgtactctaccggcagcaacgtgttccagacaagagccggatgcctgatcggagccgagtacgtgaacaatagctatgagtgcgacatccctatcggcgccggcatctgtgcctcctaccagacccagacaaagtcccacgggtctgcctcctctgtggccagccagtccatcatcgcctataccatgagcctgggcgccgagaattccgtggcctactccaacaattctatcgccatccctaccaacttcacaatctccgtgaccacagagatcctgccagtgagcatgaccaagacatccgtggactgcacaatgtatatctgtggcgattccaccgagtgctctaacctgctgctgcagtacggctctttttgtacccagctgaagagagccctgacaggcatcgccgtggagcaggacaagaacacacaggaggtgttcgcccaggtgaagcagatctacaagaccccacccatcaagtactttggcggcttcaacttcagccagatcctgcccgatcctagcaagccatccaagcggtcttttatcgaggacctgctgttcaacaaggtgaccctggccgatgccggcttcatcaagcagtatggcgattgcctgggcgacatcgccgccagagacctgatctgtgcccagaagtttaatggcctgaccgtgctgcctccactgctgacagatgagatgatcgcccagtacacatctgccctgctggccggcaccatcacaagcggatggaccttcggcgcaggagccgccctgcagatcccctttgccatgcagatggcctatcggttcaacggcatcggcgtgacccagaatgtgctgtacgagaaccagaagctgatcgccaatcagtttaactccgccatcggcaagatccaggactctctgagctccacagccagcgccctgggcaagctgcaggatgtggtgaatcacaacgcccaggccctgaataccctggtgaagcagctgtctagcaagttcggcgccatctcctctgtgctgaatgatatcctgagcaggctggaccctccagaggcagaggtgcagatcgaccggctgatcacaggcagactgcagtccctgcagacctacgtgacacagcagctgatcagggcagcagagatcagggcctctgccaatctggccgccaccaagatgagcgagtgcgtgctgggccagtccaagagagtggacttttgtggcaagggctatcacctgatgagcttcccacagtccgcccctcacggagtggtgtttctgcacgtgacctacgtgccagcccaggagaagaacttcaccacagcaccagcaatctgccacgatggcaaggcacactttcctagggagggcgtgttcgtgagcaacggcacccactggtttgtgacacagcgcaatttctacgagccacagatcatcaccacagacaatacattcgtgtccggcaactgtgacgtggtcatcggcatcgtgaacaataccgtgtatgatcctctgcagccagagctggactcttttaaggaggagctggataagtacttcaagaatcacaccagccccgacgtggatctgggcgacatctctggcatcaatgccagcgtggtgaacatccagaaggagatcgacaggctgaacgaggtggccaagaatctgaacgagtccctgatcgatctgcaggagctgggcaagtatgagcagtacatcaagtggccctggtatatctggctgggcttcatcgccggcctgatcgccatcgtgatggtgaccatcatgctgtgctgtatgacaagctgctgttcctgcctgaagggctgctgttcttgtggcagctgctgtaagtttgatgaggacgatagcgagcctgtgctgaagggcgtgaagctgcactacacctgatagccacctatagcaagtgatgtagtatttagtctatgattagttatagaaaaacattaggataaatacacatcctaggccgggccaaaatgtctctagacagattgaagctcaatgatgtctcaaacaaggatagcctgctgtccaactgcaaatacagtgttaccagatccacaggcgatgtaaccagtgtgtctggtcatgctatgcagaaagcccttgcaaggacactcggcatgttcttacttactgccttcaaccgttgcgaagaagtggcagaaatagggctccaatatgccatgtccttgctaggcagagatgatagcatcaagatattaagagaagccggctacaatgtaaaatgtgtggacacacagctcaaggactttacaatcaaattacaaggaaaggaatacaaaatacaagtcctagatatagtgggaatagatgcagccaatttagctgatctagagatacaagccagaggagtggtagcaaaagaactcaaaacaggagccaggctacctgacaatcggaggcatgatgcaccagattgtggtgtgatagttctctgtattgcagcattagttgtttccaaattagctgcaggggacaggggaggacttgatgctgtggaaagaagggctttaaatgtgctgaaagccgagaaagccaggtaccccaacatggaggtcaagcagatagctgaaagtttttatgatctgtttgaaaggaagccttattacattgatgtcttcatcacttttggcctggcccagtctagtgtcaagggaggcagcaaagttgaggggctgttttcaggtctcttcatgaatgcatacggggcaggacaagttatgctgaggtggggtttactggcaaaatctgtcaagaacatcatgctaggccatgctagtgtacaagctgagatggaacaggtggttgaggtttacgaatatgctcagaagcaaggaggggaggcaggattctatcacatcagaaataatccaaaagcttcacttctctctttgaccaattgtcctaatttcaccagtgttgtgcttggcaatgctgcaggtttaggcatcatagggtcatataagggtgctcctaggaatagagaactctttgatgctgccaaagattatgcagaaagattaaaggacaacaatgtaattaactacagtgcattaaacttgactgcagaagaaagagagctgatcagccagcagctgaacattgttgatgacactcctgatgatgatatttaattaaaactggaaaatgtaggataaatatggagaaattcgcccccgaatttgttggcgaggatgctaacaagaaggcagaggagtttctcaaacatagatccttcccttcggaaaaaccactagctggtataccgaacactgccactcatgtcaccaaatataacatgccccctatattgcgtagctcattcaaactcccttccccgagagttgctgcaaatcttactgaaccctctgctccccctaccactccaccacccacacctccccagaacaaggaagagcagcccaaagagtctgatgttgacattgagactatgcatgtctgtaaggttcctgacaatccggaacacagcaagaagccatgctgctcagatgataccgatactaagaaaactaggaagccgatggtcacctttgtggaacccgaggagaaatttgtcggattgggagctagcttgtacagggagaccatgcagacctttgctgctgatggttatgatgaagaaagcaacctatcgtttgaggagactaaccaagagccgggttcttcatctgtagaacaaagactagatagaatagaggagaaattgtcctacataataggccttttaaacaccataatggtagcgactgctggacctaccactgctagagatgagattagagatgcccttataggcactagagaagaacttattgagatgatcaagtctgacatcttgactgtcaatgacagaatagtggccatggagaagctcagagatgaggaatgctccagagctgacactgatgatggatcagcctgttatttaacagacagagcaaggatactagataagatagtgtccagcaatgctgaagaggctaaggaagatttggatgttgatgacatcatgggcattaatttttagttaattaaaataacaacaggacaaataatggaggcctacttggtagagatgtaccatggtgtcccatatacagctgcagtacagctaaacttggttgaaaaacattcagccaacatatcactaactgtgtggataccgatgtttcaaacatctctaccaaagaactccgttatggacctgctacatgatgttacagtcatttgtacacagatatcaacagtgcatggtcccatgatcaaggtagatctgagctcttccaatgcaggtttagctaccatgccaaggcaattcttgataaatgctatcatagctttggatgactggggcaacatggattacgaagtgcctgttgcttttgataaaaagagcttctgtgtgacaattcttaagcctaaaaacatgctttacactgtacccagcattactcccactaatcgacctactcatgagctgatagctgtctgctctttccataacagggtaacattaaagtcattcaatatacctgtcttcatcagagcactgtctatcagacagcaggaccttgatagtgtggagcaggctataagctccgatgtggaccatgctataacaacagctagggtggctccctatgcagggcttacacttgtgatcaacatcacatccaccaaaggagcattcaaactgctaaaggcaggtagtcagattcttgcagaactgggtccctatctgacgcaggtgagcctacatgatgtgattatgaactggaaacatacaggcacttcctacatactcaagagctcctcaacaagtggatgaaaaagagaaagtcaccattgatcagctcaatccacaactacaaccccacgatttcacacagcacaacaaccaccgccaccaacatccacatgacaaccacacatacacacccacatacatatatacacatatcttagttaaataaaatcaggataaataatggatcctaacatgacctcacaccagatcaccctcgagatcaacatgaccagcagccgtattggcacatacactacaccagccccaacagctcttctccttgcatgtgccgtcatcaacacagtgtgtgcgctgataatggcctgcagcagtagaagcactgccacatcaggcattgtcagcagccaatgcacagttcatcccaatcaccctccaccaagttatggcgtcaatgtaactggtctgccgggtaacctatactcaaggaacactacataacattataaataacagaaattatccttcaataaaccccaggccagacagctttaccctgctagacgattcaatcagcccttgcagtatgtcgtctagttaacaaaaaaccggtaggataagtactatcctattggaaccaaacgagacctgtagagcagctcacacaagagaaccacaagctgacttcacctagtatgggaaggaacttagaagtgagtggcagcattaccaatttgaactttgagagaactcagcatcctgacacatttaggactgttgtaaaagtgaaccaaatgtgtaagcttattgcaggtgtgctcacaagtgctgctgtggcagtttgtgtgggggtcataatgtattctgttttcacatcaaaccacaaggccaactccacgcagaatgccacgacccggaacagcacatccacccctccccaaccaaccgccggtctgcccaccacagagcaagggaccatccccagattcaccaaaccccccaccaaaaccgccacccaccatgagatcacagagcccgtcaaaatggcaacaccttcagaggatccctaccaatgctccagcaatggttatttggaccgacctgatttacctgaaaatttcaaactcgtattggatgttatatgcaagcctccaggtcctgaacatcacaacaccagctgttatgagaaacgtgaaatcaacccaggaagtgtttgccctgatcttgtaacaatgaaggcaaacatgggcttaaacaatggtggtggggaggatgctgcaccttatatagaggttaccaccctttctacgtactccaacaaaagggcaatgtgtgtccacaatgggtgtgatcaaggcttctgtttcttcctttctggtttaagcactgatcaggagagagctgtgctagagcttggaggtcaacaggctatcatggagttgcattatgattcctactggaaacactattggagtaactctaattgtgttgttcccagaacaaactgcaacctgacagaccaaactgagattttgtttcctaggtttaacaacaagaatcagtctcagtgtaccacctgtgcagattcagctggcctagataacaaattttatctcacatgtgatgggcttttaagaaccctccctctagttggactacccagcctaagtcctcaggcttacaaagctgtacccacacaaactacaggcaccaccacggcaccaacatcagagacgaggcacccaacccctgcacccaggaggtccaaacctctcagtcggaagaagagagctttatgtggtgtagactcaagcagagaacccaaaccaacaatgccttactggtgtcctatgctccaattatttccaaggaggtctaattcttaagtgacctattcctgaattaacttcagaataagtaccaaccttatcagtagttaatgaaaactaagctttgatataataggacaaatatgattcctggcaggatctttctagtccttctggtgatcttcaacaccaagccaattcacccaaatacattaacagaaaaattctatgagtccacatgtagtgttgagactgcaggttataagagtgcccttagaacaggttggcatatgacagttatgtcaattaagttgtctcaaataaatattgagtcatgcaagagcagcaactcgttattggctcatgagcttgcaatctatagtagtgcagtggatgaattgagaacgttatcatccaatgccttgaagtccaaaaggaagaagaggttcctcggtttgattcttggtctcggagctgcagtcactgccggggtggctttagccaagacagtgcaacttgaaagtgagattgcattgattagagatgcagtgagaaatacaaatgaggctgttgttagcctaaccaacggcatgtcagtgttggctaaagtggtggatgatttgaaaaacttcatatctaaagaattactcccaaaaataaaccgagtctcttgtgatgtgcacgacatcactgccgtcattagattccaacagctcaacaaaagacttttggaagtatctcgtgaattttcatctaatgcaggattaacacacactgtttcatcttttatgttaacagaccgggaactcacctccattgtaggcggcatggctgtttcagcaggccaaaaagagataatgctatctagcaaagctataatgagaagaaatgggttagcaatattaagttcagtcaacgctgacacactggtttatgtaatacaactcccattatttggtgttatggacacagattgttgggtaataagaagttctatagactgtcataacatagcagacaagtatgcttgtttggctagagctgataatggctggtattgtcacaatgctggctcattatcatacttcccgtcgccaacggattgtgagatccacaatgggtatgctttctgtgacactctaaaaagtctaactgtacctgtaacatcacgagaatgcaactcaaacatgtataccactaactacgattgtaagatttccacaagtaaaacttatgtgagtacagcggtactgactacaatgggttgcttggtatcttgttatggtcataacagttgcacagtcatcaataatgacaaaggtataataaggactctgccagatggttgccactacatctccaacaaaggtgtggacagggttcaagtaggtaacactgtttactatcttagcaaagaagttggcaagtcaattgttgtcagaggggaaccattggtcttgaaatatgaccctttgagtttccctgacgataaatttgatgttgctataagagatgtggagcatagcatcaatcagacacgcacattcttgaaggcctctgatcagttattggacttaagtgaaaacagagagaataaaaatttaaacaagtcatatatactaacaactctgctcttcgttgtaatgcttattataataatggctgtcatagggttcattctgtataaggtattgaaaatgatcagagacaacaagttgaaatccaaaagtacacctggcctcacagttttatcatgacaattgtaccaaaccataattgagttagttaattaaaaacttaggataagtgacaatccagacccaacacctctttcaactctcaaggataaggtaggatgagtgtgagaccttgcaaatttgaggttcaagggttttgttccagagggaggaattgcaagtatagtcataaatattgggaatggcctttgaaaactcttatgctcaggcagaactacatgcttaataggatttataggttcctcgacaccaacacagatgcaatgtcagatgtcagcggatttgatgcaccacaaaggactgctgagtatgccttgggaaccataggtgtgctgaaaagttacctggaaaaaactaacaacatcactaaatcaatagcttgtggcagtttgatcactgtattgcagaacttggatgttggtctagtaatacaagcaagagatagcaacactgaggacaccaattacttgagaagttgcaacactatactgtcttatatagacaagatacacaagaagagacaaattattcacattctcaaaagactgccagtaggagtactatgcaatctgatccaatctgtcatctccatcgaggagaagataaattcttctatgaaaacagaatgataaggctgcctaaatactatccagccatactgcataagatgtatattattagagtaaatagaaacctcacttacgatgggtctggaccatccacaataatagatgcaggaaagtctgtggtgtggaatcgtgttgatgtgatagcttgtgtgaaagaggccttgtgctgcatagaattcagctggaataaccaagtgatcatagactttgattatagccaggccagatgatgtggactgtattcctttttttgtcagtaatcagttattaacccaaaattgttaattatgtagactttaagttaactaacttcatgttaattcaatagttatataaaaaaatattcgaattaggatcaatatggatcctattgatgaacaagaagttaatgtgtacttgccggatagctacttaaagggtgttatatcttttagtgaaactaatgctcttggcagctgtatcattggtagacctttcttgaaggatgactttactgccactacttcaatccgtaaccccctaattgaacataaaagaataagggacactaaattagtaaaaaatattgtttcaaaccctcaatataggttagtggagcctctccaaatgcagcatgagctcttgagtgtactatcgcccaatttcatattgcacactgccaacttaaggaaaattatacaaagaagtgttgacataacagataaaaagttgaaccccattttgcacattttgaatcttaattctcctaaccaagagggtaaggtgtcggaacggctaactaggctaattaagaaacatctctctcacatacctaattgggtaagcagctggtacaatatatgggtcaatcttaacaacttactgcaggagtaccgttcaaaggaagttatagaccataactgtgttctgactaggcaattgtctggaagtttcatacatgtggtcatgagtcaatatggagttgtgataattagcaaaaaaagtaaaagatatacaatgtgtacttataaccaattcctaacctggaaggaccttgccttgagcagatttaatgccaattatgtggtctggctaagtaatgtgttaaacacactcaacgaggggttgggattaaggtgtagattaaaaggtcatctgctcagtaagttgtacatttccactgacatctttttatcttcaacatctaatgaattttataatgtggtcaaggaatttgagggcttcatcatgtcactgatattgaaacaaactgaggaagccttatttagcacaaggttttataataacatgttgaacaacttaattgatgccattgatagggctcgactagagtatctggcccgctgtgccaattcagctgccaggattaatttacctagtacagatgttatgatagcatcattgggtgatatcttatctttgataaacgttttaggtgaatccaaccttaacaacttaagtgagttatattttatcttcaggatatttggtcaccctatggttgatgagaggaaggccatggatgcagtcagagataactgttgtgaaacaaagtttctgacggctaagaaccttgcatcgttaagaggagcatatgtttatagaattatcaaaggattcgtagcaaattataacaggtggccttacataaaaactagagtttgccttacaccaacatggattaactatcttgacaccaattcatgtccctcattattagagatgacagaagatgattttattgtgttagctggagtgcactttataagagaattccacatcccaaagctaactgatctggagattatattaaatgacaaggccatatctcctccaaaatcactcatttggtcatgctttccaaaaaactacatacctcaggttatacaagatgagtatgcccggaggtattgtagagctaaagcacctttgaagacaagacgtgtcttggagttctacttacaggacaaggatttcaagttggatcagctccatagagtagtagtgaaccaggactaccttaatgataaagaacatataatttctttaacaggaaaagaaagagagttgggtgttggtaggatgtttgccatgcaacctgggaagcagaggcaagtccaaattttagcagagaagctgttggctgataacatcctgcaattctttccggagacactgactagatacggtgatttggagctgcaaaagatactagagttaaaagctggactttcaaataaaaatgacagatctaaagactcctacaataattatataagtaggtgctcattaattactgatttaagtaaatttaaccaagcttttaggtacgagtcatcctgtgtgtgtagtgatcttttagatgagctacatgggactcaaagcttattctcttggctgcatttaacagtaccactgactactataatgtgtacatataggcatgcgccgccggacactggaaacaactataatgtagatgatattgctgagcagagtggactctaccgctaccacatgggcgggattgagggctggtgccagaagctctggacaacagaggccattgctttgctagatactgtagctgtgaagggccgtttccagctaacttcattaataaatggcgacaaccaaagtattgatatttcaaaaccaacaaggctggggaccaggactcaaagtgaagcagattatgatttggcaataaattctttaagattaatatcagcagcttataaaggcattggacataaattaaaagaaggtgagacctacttgtcacgtgacatgcagttcatgagtaaaacaatacaacatgaaggggtctactacccggcctccatcaagaaaatattaagagttggtccctggatcaacacaatattagatgatataaaaacttcaacagaaagtattggttctctaactcaagaactagaatataaaggtgaaagtttaatgagcagcctgctgctgaggaacttctggctctacagattatattcagtggatttaaaagatcattctttgtgtggaaagcagctctacagatccttaataaaagtgttaaaacatttgaagaggtgcttcaacctggagaaccttggggaatgtttggaattatttttaaatgtgcccatgcagtttggaggtgctgacccaaatgtcatctacaggagcttctacagaagaactccagattttctaacagaaagtataactcatctcatcctcattttaaaacattttagaagagatttggaattcaacaaagataatgtctccaaagctgttctttctttgctagagttcaccaagaatgattctgcagaatttgtaactttgatgagagatcctcaagcaattggtagtgagaggcaggccaagatcacttcagacatcaacagaacagctgtaacttcagtgttatcaaatgctccaaatgaaatatttagaacttcagctcttcattacagcagcacagaaaatgaattaaatggaatagcaagtggagtttctcctgtttatcctcatggtcttcgagttttatatgaaagtttacctttttataaagcagagaagattgtcaacatggtttctgggaccaagtccatcaccaacatactggagaagacatcagccatctcctacacagatataattcgagccaccaacatgatggtggagaacctcactttgctaacaagaataatgaaaccaggtgctgacacatctttggatcctgacacaatagtaataacaatattatcaaaaataataagagataaatcctgggatgttggtgatataattggtgtcacttccccatctcctgtctcctgcttcaaggtggtctacacatcaactctacaaaataattcagtagtaatagaaagatacacaacagacacctacacaagaggtaagagaggccccaccaagccctgggtgggcagcagcacacaggagaagaagtccatgcctgtctacaacagacaagttttaacaagaggacaaagagatcaaatagaaaatatagcaaagctggagtgggtgttttcttcagtagcaaatattgattctttgctaaatgagctcagcaccatgactttgggtctttctctaaggaaatgtagacaactttttccaacatatttaagtttaaacttcctgcacaggctttctgtcagcagcaggcccagagaatatccttcttctcttcctgcctacaggacaacaaattttcattttgatactggaccaataaataaagtgttaacagaaagatttggagatgaagatataaatttggtatttcaaaatgcaatatcatatggtctttccaccatgtctttggtggagcagtttactggtgtctgtccaaataaagttttgctggtgcccaagctacaagaaatacaactaatgaaagttccaatatttcaaggtggcttcaacctacaaagtataattccaataataaggcagcagcacatgttcctgcccaaccacatcactccagcccagtatattgaattatttctttcttcaaaacaatttcattcaagaataaatttaaaacacaacaacagatttaaacttgttttacaaaaagattattttaatggggagaacatgatagaaactttgtccacctgtttggcaggccactggatcatcattttgatgctaatgaaggagagtcaggggatatttgacaaggagtggtatgatggttttgtaacagaccacatgttcctggacctgcagctcttcctctcctccttcaagacatttctaactgtcttcaactttgcttatttaaaagttggttcaaatatagaagaaataacaggaaatcaagccaacctgctggagctgctggacctgggctactggaagaacatgtataaagtattttcagagaccaaggtgcggctggctttgctaaaacaagatttatcatttaattctgtgaagaacagcagcagcttccggcactggtttataaattctctacaagaagtacaatgtacttctgtgccttgggtggtaaatgtaacaagaaatccaactcatttaaaaggtgttctacagtacatgaagatgatagaaagtggcatgattcaaggttattcagcaaatatttcttcagttttaagtatcccatataattatccagacatggcgcacatgatgacaaaaataataagaaatcgaggccacatgtcctatgattatccaaagatgaagaaaagtttaactttctccatgacagacatgagtgacagctacatgctcaacctcttccccaaagtagaatgttcttacatgagtggttatttggataaactagatgatactctacaacttctaaagaaacctcctgttggaagaaaagttccttctgtggctttgccctggcaccactgcaacagatacaactttgtcttcagcagcacaggctgcaaagtttctgtcattgacatgcttccaaaacatttccgaagaagtaatttaaaagtaatatgttttattggagaaggggcgggcaacctcatgctaagagctgttttggaagttggtggaaatataaaattaatatatagatccttaaaagatcctgatgatcatcatgttcctgtagaatttctaagattaaaaccttgttatccttatattgatactggtggcagtttatctttggcttcaacagatgccaccaacaaggcccactgggattatttacatcttcactggacagatcctttaaatttaatagtatgtgatgcagaaataagtggtgtgaagcactggctaaaaattcttcacaggtggtatgagcacatgacttcctgcaagcactgtttaaaatcagaacatgataaatatttaataataaaatatcatgctcaagatgatttaatagatcttcctcatggtgtcaggctactaaaatgtaacatctgcctgggctccaaactaagtggcagtgagagctacctgctcattggtcttggtctttcaaataaacttcctgtctacagtgaagttcttcattcaaaacttcttttggcagaatgtcatcagtttcatcatccaaaatatttggatgtttctggaataaatacaaatataaaatccttaataccaatgttggattatccaataacttacaacaagatcaccactttgctagaaagtgtgcgggagctttcttcaaataaaaacaagaacaccatgtggattggaagaaatcctgtctaccataataaatggctaaagaggaaatatttcaacattttaaaatggctaaaatactgtatagaacttcctgccttcaggatggattataattcatttgagagaatagaaatgctttatccaaatttaagagatttggtagattctgtttctacttcagagctgaagaaagtaataaaagtaacaggcatcctcttcaggagcaacaccatgtgaattaatatgccaatgctaacatgtcatccccactactttttttgttcaatcactctcagtctagacatgtgagaagatcccaaacccaactgcacccctcccactcgaaatcagttgtagcctcagcagctccatctgccatgatctctgaccagcagcaaatgtattattattttaatttgtctatagttaacaaaaaattgatatctcacaggttgtaaacatagttcttttataattattgttagttaaactattgtgtttgacttcctttgggtatttttttcccgtgggtcggcatggcatctccacctcctcgcggtccgacctgggcatccgaaggaggacgcacgtccactcggatggctaagggagagcctgcagtagcataaccccttggggcctctaaacgggtcttgaggggttttttgctgaaaggaggaactatatacgcgtcgacgggcccgcgctcactggccgtcgttttacaacgtcgtgactgggaaaaccctggcgttacccaacttaatcgccttgcagcacatccccctttcgccagctggcgtaatagcgaagaggcccgcaccgatcgcccttcccaacagttgcgcagcctgaatggcgaatgggacgcgccctgtagcggcgcattaagcgcggcgggtgtggtggttacgcgcagcgtgaccgctacacttgccagcgccctagcgcccgctcctttcgctttcttcccttcctttctcgccacgttcgccggctttccccgtcaagctctaaatcgggggctccctttagggttccgatttagtgctttacggcacctcgaccccaaaaaacttgattagggtgatggttcacgtagtgggccatcgccctgatagacggtttttcgccctttgacgttggagtccacgttctttaatagtggactcttgttccaaactggaacaacactcaaccctatctcggtctattcttttgatttataagggattttgccgatttcggcctattggttaaaaaatgagctgatttaacaaaaatttaacgcgaattttaacaaaatattaacgcttacaatttaggtggcacttttcggggaaatgtgcgcggaacccctatttgtttatttttctaaatacattcaaatatgtatccgctcatgagacaataaccctgataaatgcttcaataatattgaaaaaggaagagtatgagtattcaacatttccgtgtcgcccttattcccttttttgcggcattttgccttcctgtttttgctcacccagaaacgctggtgaaagtaaaagatgctgaagatcagttgggtgcacgagtgggttacatcgaactggatctcaacagcggtaagatccttgagagttttcgccccgaagaacgttttccaatgatgagcacttttaaagttctgctatgtggcgcggtattatcccgtattgacgccgggcaagagcaactcggtcgccgcatacactattctcagaatgacttggttgagtactcaccagtcacagaaaagcatcttacggatggcatgacagtaagagaattatgcagtgctgccataaccatgagtgataacactgcggccaacttacttctgacaacgatcggaggaccgaaggagctaaccgcttttttgcacaacatgggggatcatgtaactcgccttgatcgttgggaaccggagctgaatgaagccataccaaacgacgagcgtgacaccacgatgcctgtagcaatggcaacaacgttgcgcaaactattaactggcgaactacttactctagcttcccggcaacaattaatagactggatggaggcggataaagttgcaggaccacttctgcgctcggcccttccggctggctggtttattgctgataaatctggagccggtgagcgtgggtctcgcggtatcattgcagcactggggccagatggtaagccctcccgtatcgtagttatctacacgacggggagtcaggcaactatggatgaacgaaatagacagatcgctgagataggtgcctcactgattaagcattggtaactgtcagaccaagtttactcatatatactttagattgatttaaaacttcatttttaatttaaaaggatctaggtgaagatcctttttgataatctcatgaccaaaatcccttaacgtgagttttcgttccactgagcgtcagaccccgtagaaaagatcaaaggatcttcttgagatcctttttttctgcgcgtaatctgctgcttgcaaacaaaaaaaccaccgctaccagcggtggtttgtttgccggatcaagagctaccaactctttttccgaaggtaactggcttcagcagagcgcagataccaaatactgtccttctagtgtagccgtagttaggccaccacttcaagaactctgtagcaccgcctacatacctcgctctgctaatcctgttaccagtggctgctgccagtggcgataagtcgtgtcttaccgggttggactcaagacgatagttaccggataaggcgcagcggtcgggctgaacggggggttcgtgcacacagcccagcttggagcgaacgacctacaccgaactgagatacctacagcgtgagctatgagaaagcgccacgcttcccgaagggagaaaggcggacaggtatccggtaagcggcagggtcggaacaggagagcgcacgagggagcttccagggggaaacgcctggtatctttatagtcctgtcgggtttcgccacctctgacttgagcgtcgatttttgtgatgctcgtcaggggggcggagcctatggaaaaacgccagcaacgcggcctttttacggttcctggccttttgctggccttttgctcacatgttctttcctgcgttatcccctgattctgtggataaccgtattaccgcctttgagtgagctgataccgctcgccgcagccgaacgaccgagcgcagcgagtcagtgagcgaggaagcggaagagcgcccaatacgcaaaccgcctctccccgcgcgttggccgattcattaatgcagctggcacgacaggtttcccgactggaaagcgggcagtgagcgcaacgcaattaatgtgagttagctcactcattaggcaccccaggctttacactttatgcttccggctcgtatgttgtgtggaattgtgagcggataacaatttcacacaggaaacagctatgaccatgattacgccaagcgcgcccgggtaatacgactcactataggg

SEQ ID NO: 52 - DNA, 18750 bp, synthetic construct
  source 1..18750: mol_type = other DNA
acgcgaaaaaatgcataacaaaactatcaacctgaaaaaagttaggacaagtgaagattgctagtcccaaagaccagaatcatgggctgtaatgtgatgatggagcttgattatggtggacgagctgcatggctggcattccacataaccaactttgataggtcagatttggaaactatcctaagaggtgctagggtgtgcaatacatggcaagatcagagactctccgtgtaccttgtgggaagggattgcaatttgttaagaccatttgtgcaagctgccaaatttatccataatactaggagaggccaaacattaacacattggttcacaaaaaatatcgtgtttagttctacagggcaagagacagagcctcccattgaccccacatgtgagctgttggtagagctgatcagtggttaagatgacagcacattatgtagttaattaaaacaaagggtaggacaagtcctaatgtccacagctatgaacaagttcactcagaccatctctaaacctgccactatcttgaatatttcagacagtgaagagtcgggcgatgaggcaggggtgggcaaggtgtcccgtaccacacagagctcagagaggtggcttgatttgctcattgaaaagttccagccgagcctacaaaacatcactagatacatcaactggaacttcatcaggatctgcaatgataggcttaaaaaagaaaaaatggggtacattgaggccaagcaatatgtggaagacatggcttggatggtgatagcatctgaggcagacagcattgagtggaagtgcataaggaggcaggagaaagtgactggggtgaaatacccaaagttcttctttgtacaacacaaagaggactggattgagtgcacaggatgcattccgtacccaggccatgacttgatctatgatgaggatgatgatgactgagctgactcagatcactccaaccagcagagagatccatagttatagaaaaacattaggataaatacacatcctaggccgccaccatgttcgtgtttctggtgctgctgcctctggtgagctcccagtgcgtgaacctgatcacaaggacccagtcctataccaattccttcacacggggcgtgtactatcccgacaaggtgtttagatctagcgtgctgcactccacacacgatctgtttctgcctttcttttctaacgtgacctggttccacgccatccacgtgagcggcaccaatggcacaaagcggttcgacaatccagctctgccctttaacgatggcgtgtacttcgcctccaccgagaagtctaacatcatcagaggctggatctttggcaccacactggacagcaagacacagtccctgctgatcgtgaacaatgccaccaacgtggtcatcaaggtgtgcgagttccagttttgtaatgatccattcctggacgtgtatcagaagaacaataagtcttggatggagagcgagtttcgcgtgtattcctctgccaacaattgcacatttgagtacgtgtcccagcccttcctgatggacctggagggcaaggagggcaatttcaagaacctgagggagttcgtgtttaagaatatcgatggctacttcaagatctactccaagcacaccccaatcaacctggagcgcgacctgccacagggcttctctgccctggagccactggtggatctgcccatcggcatcaacatcacccggtttcagacactgctggccctgcacagaagctacctgacaccagtcgacagctcctctggatggaccgcaggagctgccgcctactatgtgggctatctgcagcccaggaccttcctgctgaagtacaacgagaatggcaccatcacagacgccgtggattgcgccctggatcccctgtctgagaccaagtgtacactgaagagctttaccgtggagaagggcatctatcagacaagcaatttcagggtgcagcctaccgagtccatcgtgcgctttcccaatatcacaaacctgtgcccttttcacgaggtgttcaacgcaaccaccttcgccagcgtgtacgcctggaataggaagcgcatctccaactgcgtggccgactattctgtgatctacaactttgctccattcttcgcctttaagtgctatggcgtgagccccacaaagctgaatgacctgtgctttaccaacgtgtacgccgattccttcgtgatcaggggcaacgaggtgagccagatcgcccctggccagacaggcaacatcgccgactacaattataagctgcctgacgatttcaccggctgcgtgatcgcctggaactctaacaagctggatagcaaaccgagcggcaactacaattatctgtaccggctgcttagaaagtctaagctgaagccattcgagagggacatctccacagagatctaccaggccggcaacaagccctgcaatggcgtggctggccctaactgttattcccctctgcagagctacggcttcaggccaacatacggcgtgggacatcagccctaccgcgtggtggtgctgtcttttgagctgctgcacgcacctgcaacagtgtgcggaccaaagaagagcaccaatctggtgaagaacaagtgcgtgaacttcaacttcaacggactgaccggcacaggcgtgctgaccgagtccaacaagaagttcctgccttttcagcagttcggcagggacatcgcagataccacagacgccgtgcgcgaccctcagaccctggagatcctggatatcacaccatgctccttcggcggcgtgtctgtgatcacaccaggcaccaatacaagcaaccaggtggccgtgctgtatcagggcgtgaattgtaccgaggtgcccgtggcaatccacgcagatcagctgacccctacatggcgggtgtactctaccggcagcaacgtgttccagacaagagccggatgcctgatcggagccgagtacgtgaacaatagctatgagtgcgacatccctatcggcgccggcatctgtgcctcctaccagacccagacaaagtcccacgggtctgcctcctctgtggccagccagtccatcatcgcctataccatgagcctgggcgccgagaattccgtggcctactccaacaattctatcgccatccctaccaacttcacaatctccgtgaccacagagatcctgccagtgagcatgaccaagacatccgtggactgcacaatgtatatctgtggcgattccaccgagtgctctaacctgctgctgcagtacggctctttttgtacccagctgaagagagccctgacaggcatcgccgtggagcaggacaagaacacacaggaggtgttcgcccaggtgaagcagatctacaagaccccacccatcaagtactttggcggcttcaacttcagccagatcctgcccgatcctagcaagccatccaagcggtcttttatcgaggacctgctgttcaacaaggtgaccctggccgatgccggcttcatcaagcagtatggcgattgcctgggcgacatcgccgccagagacctgatctgtgcccagaagtttaatggcctgaccgtgctgcctccactgctgacagatgagatgatcgcccagtacacatctgccctgctggccggcaccatcacaagcggatggaccttcggcgcaggagccgccctgcagatcccctttgccatgcagatggcctatcggttcaacggcatcggcgtgacccagaatgtgctgtacgagaaccagaagctgatcgccaatcagtttaactccgccatcggcaagatccaggactctctgagctccacagccagcgccctgggcaagctgcaggatgtggtgaatcacaacgcccaggccctgaataccctggtgaagcagctgtctagcaagttcggcgccatctcctctgtgctgaatgatatcctgagcaggctggaccctccagaggcagaggtgcagatcgaccggctgatcacaggcagactgcagtccctgcagacctacgtgacacagcagctgatcagggcagcagagatcagggcctctgccaatctggccgccaccaagatgagcgagtgcgtgctgggccagtccaagagagtggacttttgtggcaagggctatcacctgatgagcttcccacagtccgcccctcacggagtggtgtttctgcacgtgacctacgtgccagcccaggagaagaacttcaccacagcaccagcaatctgccacgatggcaaggcacactttcctagggagggcgtgttcgtgagcaacggcacccactggtttgtgacacagcgcaatttctacgagccacagatcatcaccacagacaatacattcgtgtccggcaactgtgacgtggtcatcggcatcgtgaacaataccgtgtatgatcctctgcagccagagctggactcttttaaggaggagctggataagtacttcaagaatcacaccagccccgacgtggatctgggcgacatctctggcatcaatgccagcgtggtgaacatccagaaggagatcgacaggctgaacgaggtggccaagaatctgaacgagtccctgatcgatctgcaggagctgggcaagtatgagcagtacatcaagtggccctggtatatctggctgggcttcatcgccggcctgatcgccatcgtgatggtgaccatcatgctgtgctgtatgacaagctgctgttcctgcctgaagggctgctgttcttgtggcagctgctgtaagtttgatgaggacgatagcgagcctgtgctgaagggcgtgaagctgcactacacctgatagccacctatagcaagtgatgtagtatttagtctatgattagttatagaaaaacattaggataaatacacatcctaggccgggccaaaatgtctctagacagattgaagctcaatgatgtctcaaacaaggatagcctgctgtccaactgcaaatacagtgttaccagatccacaggcgatgtaaccagtgtgtctggtcatgctatgcagaaagcccttgcaaggacactcggcatgttcttacttactgccttcaaccgttgcgaagaagtggcagaaatagggctccaatatgccatgtccttgctaggcagagatgatagcatcaagatattaagagaagccggctacaatgtaaaatgtgtggacacacagctcaaggactttacaatcaaattacaaggaaaggaatacaaaatacaagtcctagatatagtgggaatagatgcagccaatttagctgatctagagatacaagccagaggagtggtagcaaaagaactcaaaacaggagccaggctacctgacaatcggaggcatgatgcaccagattgtggtgtgatagttctctgtattgcagcattagttgtttccaaattagctgcaggggacaggggaggacttgatgctgtggaaagaagggctttaaatgtgctgaaagccgagaaagccaggtaccccaacatggaggtcaagcagatagctgaaagtttttatgatctgtttgaaaggaagccttattacattgatgtcttcatcacttttggcctggcccagtctagtgtcaagggaggcagcaaagttgaggggctgttttcaggtctcttcatgaatgcatacggggcaggacaagttatgctgaggtggggtttactggcaaaatctgtcaagaacatcatgctaggccatgctagtgtacaagctgagatggaacaggtggttgaggtttacgaatatgctcagaagcaaggaggggaggcaggattctatcacatcagaaataatccaaaagcttcacttctctctttgaccaattgtcctaatttcaccagtgttgtgcttggcaatgctgcaggtttaggcatcatagggtcatataagggtgctcctaggaatagagaactctttgatgctgccaaagattatgcagaaagattaaaggacaacaatgtaattaactacagtgcattaaacttgactgcagaagaaagagagctgatcagccagcagctgaacattgttgatgacactcctgatgatgatatttaattaaaactggaaaatgtaggataaatatggagaaattcgcccccgaatttgttggcgaggatgctaacaagaaggcagaggagtttctcaaacatagatccttcccttcggaaaaaccactagctggtataccgaacactgccactcatgtcaccaaatataacatgccccctatattgcgtagctcattcaaactcccttccccgagagttgctgcaaatcttactgaaccctctgctccccctaccactccaccacccacacctccccagaacaaggaagagcagcccaaagagtctgatgttgacattgagactatgcatgtctgtaaggttcctgacaatccggaacacagcaagaagccatgctgctcagatgataccgatactaagaaaactaggaagccgatggtcacctttgtggaacccgaggagaaatttgtcggattgggagctagcttgtacagggagaccatgcagacctttgctgctgatggttatgatgaagaaagcaacctatcgtttgaggagactaaccaagagccgggttcttcatctgtagaacaaagactagatagaatagaggagaaattgtcctacataataggccttttaaacaccataatggtagcgactgctggacctaccactgctagagatgagattagagatgcccttataggcactagagaagaacttattgagatgatcaagtctgacatcttgactgtcaatgacagaatagtggccatggagaagctcagagatgaggaatgctccagagctgacactgatgatggatcagcctgttatttaacagacagagcaaggatactagataagatagtgtccagcaatgctgaagaggctaaggaagatttggatgttgatgacatcatgggcattaatttttagttaattaaaataacaacaggacaaataatggaggcctacttggtagagatgtaccatggtgtcccatatacagctgcagtacagctaaacttggttgaaaaacattcagccaacatatcactaactgtgtggataccgatgtttcaaacatctctaccaaagaactccgttatggacctgctacatgatgttacagtcatttgtacacagatatcaacagtgcatggtcccatgatcaaggtagatctgagctcttccaatgcaggtttagctaccatgccaaggcaattcttgataaatgctatcatagctttggatgactggggcaacatggattacgaagtgcctgttgcttttgataaaaagagcttctgtgtgacaattcttaagcctaaaaacatgctttacactgtacccagcattactcccactaatcgacctactcatgagctgatagctgtctgctctttccataacagggtaacattaaagtcattcaatatacctgtcttcatcagagcactgtctatcagacagcaggaccttgatagtgtggagcaggctataagctccgatgtggaccatgctataacaacagctagggtggctccctatgcagggcttacacttgtgatcaacatcacatccaccaaaggagcattcaaactgctaaaggcaggtagtcagattcttgcagaactgggtccctatctgacgcaggtgagcctacatgatgtgattatgaactggaaacatacaggcacttcctacatactcaagagctcctcaacaagtggatgaaaaagagaaagtcaccattgatcagctcaatccacaactacaaccccacgatttcacacagcacaacaaccaccgccaccaacatccacatgacaaccacacatacacacccacatacatatatacacatatcttagttaaataaaatcaggataaataatggatcctaacatgacctcacaccagatcaccctcgagatcaacatgaccagcagccgtattggcacatacactacaccagccccaacagctcttctccttgcatgtgccgtcatcaacacagtgtgtgcgctgataatggcctgcagcagtagaagcactgccacatcaggcattgtcagcagccaatgcacagttcatcccaatcaccctccaccaagttatggcgtcaatgtaactggtctgccgggtaacctatactcaaggaacactacataacattataaataacagaaattatccttcaataaaccccaggccagacagctttaccctgctagacgattcaatcagcccttgcagtatgtcgtctagttaacaaaaaaccggtaggataagtactatcctattggaaccaaacgagacctgtagagcagctcacacaagagaaccacaagctgacttcacctagtatgggaaggaacttagaagtgagtggcagcattaccaatttgaactttgagagaactcagcatcctgacacatttaggactgttgtaaaagtgaaccaaatgtgtaagcttattgcaggtgtgctcacaagtgctgctgtggcagtttgtgtgggggtcataatgtattctgttttcacatcaaaccacaaggccaactccacgcagaatgccacgacccggaacagcacatccacccctccccaaccaaccgccggtctgcccaccacagagcaagggaccatccccagattcaccaaaccccccaccaaaaccgccacccaccatgagatcacagagcccgtcaaaatggcaacaccttcagaggatccctaccaatgctccagcaatggttatttggaccgacctgatttacctgaaaatttcaaactcgtattggatgttatatgcaagcctccaggtcctgaacatcacaacaccagctgttatgagaaacgtgaaatcaacccaggaagtgtttgccctgatcttgtaacaatgaaggcaaacatgggcttaaacaatggtggtggggaggatgctgcaccttatatagaggttaccaccctttctacgtactccaacaaaagggcaatgtgtgtccacaatgggtgtgatcaaggcttctgtttcttcctttctggtttaagcactgatcaggagagagctgtgctagagcttggaggtcaacaggctatcatggagttgcattatgattcctactggaaacactattggagtaactctaattgtgttgttcccagaacaaactgcaacctgacagaccaaactgagattttgtttcctaggtttaacaacaagaatcagtctcagtgtaccacctgtgcagattcagctggcctagataacaaattttatctcacatgtgatgggcttttaagaaccctccctctagttggactacccagcctaagtcctcaggcttacaaagctgtacccacacaaactacaggcaccaccacggcaccaacatcagagacgaggcacccaacccctgcacccaggaggtccaaacctctcagtcggaagaagagagctttatgtggtgtagactcaagcagagaacccaaaccaacaatgccttactggtgtcctatgctccaattatttccaaggaggtctaattcttaagtgacctattcctgaattaacttcagaataagtaccaaccttatcagtagttaatgaaaactaagctttgatataataggacaaatatgattcctggcaggatctttctagtccttctggtgatcttcaacaccaagccaattcacccaaatacattaacagaaaaattctatgagtccacatgtagtgttgagactgcaggttataagagtgcccttagaacaggttggcatatgacagttatgtcaattaagttgtctcaaataaatattgagtcatgcaagagcagcaactcgttattggctcatgagcttgcaatctatagtagtgcagtggatgaattgagaacgttatcatccaatgccttgaagtccaaaaggaagaagaggttcctcggtttgattcttggtctcggagctgcagtcactgccggggtggctttagccaagacagtgcaacttgaaagtgagattgcattgattagagatgcagtgagaaatacaaatgaggctgttgttagcctaaccaacggcatgtcagtgttggctaaagtggtggatgatttgaaaaacttcatatctaaagaattactcccaaaaataaaccgagtctcttgtgatgtgcacgacatcactgccgtcattagattccaacagctcaacaaaagacttttggaagtatctcgtgaattttcatctaatgcaggattaacacacactgtttcatcttttatgttaacagaccgggaactcacctccattgtaggcggcatggctgtttcagcaggccaaaaagagataatgctatctagcaaagctataatgagaagaaatgggttagcaatattaagttcagtcaacgctgacacactggtttatgtaatacaactcccattatttggtgttatggacacagattgttgggtaataagaagttctatagactgtcataacatagcagacaagtatgcttgtttggctagagctgataatggctggtattgtcacaatgctggctcattatcatacttcccgtcgccaacggattgtgagatccacaatgggtatgctttctgtgacactctaaaaagtctaactgtacctgtaacatcacgagaatgcaactcaaacatgtataccactaactacgattgtaagatttccacaagtaaaacttatgtgagtacagcggtactgactacaatgggttgcttggtatcttgttatggtcataacagttgcacagtcatcaataatgacaaaggtataataaggactctgccagatggttgccactacatctccaacaaaggtgtggacagggttcaagtaggtaacactgtttactatcttagcaaagaagttggcaagtcaattgttgtcagaggggaaccattggtcttgaaatatgaccctttgagtttccctgacgataaatttgatgttgctataagagatgtggagcatagcatcaatcagacacgcacattcttgaaggcctctgatcagttattggacttaagtgaaaacagagagaataaaaatttaaacaagtcatatatactaacaactctgctcttcgttgtaatgcttattataataatggctgtcatagggttcattctgtataaggtattgaaaatgatcagagacaacaagttgaaatccaaaagtacacctggcctcacagttttatcatgacaattgtaccaaaccataattgagttagttaattaaaaacttaggataagtgacaatccagacccaacacctctttcaactctcaaggataaggtaggatgagtgtgagaccttgcaaatttgaggttcaagggttttgttccagagggaggaattgcaagtatagtcataaatattgggaatggcctttgaaaactcttatgctcaggcagaactacatgcttaataggatttataggttcctcgacaccaacacagatgcaatgtcagatgtcagcggatttgatgcaccacaaaggactgctgagtatgccttgggaaccataggtgtgctgaaaagttacctggaaaaaactaacaacatcactaaatcaatagcttgtggcagtttgatcactgtattgcagaacttggatgttggtctagtaatacaagcaagagatagcaacactgaggacaccaattacttgagaagttgcaacactatactgtcttatatagacaagatacacaagaagagacaaattattcacattctcaaaagactgccagtaggagtactatgcaatctgatccaatctgtcatctccatcgaggagaagataaattcttctatgaaaacagaatgataaggctgcctaaatactatccagccatactgcataagatgtatattattagagtaaatagaaacctcacttacgatgggtctggaccatccacaataatagatgcaggaaagtctgtggtgtggaatcgtgttgatgtgatagcttgtgtgaaagaggccttgtgctgcatagaattcagctggaataaccaagtgatcatagactttgattatagccaggccagatgatgtggactgtattcctttttttgtcagtaatcagttattaacccaaaattgttaattatgtagactttaagttaactaacttcatgttaattcaatagttatataaaaaaatattcgaattaggatcaatatggatcctattgatgaacaagaagttaatgtgtacttgccggatagctacttaaagggtgttatatcttttagtgaaactaatgctcttggcagctgtatcattggtagacctttcttgaaggatgactttactgccactacttcaatccgtaaccccctaattgaacataaaagaataagggacactaaattagtaaaaaatattgtttcaaaccctcaatataggttagtggagcctctccaaatgcagcatgagctcttgagtgtactatcgcccaatttcatattgcacactgccaacttaaggaaaattatacaaagaagtgttgacataacagataaaaagttgaaccccattttgcacattttgaatcttaattctcctaaccaagagggtaaggtgtcggaacggctaactaggctaattaagaaacatctctctcacatacctaattgggtaagcagctggtacaatatatgggtcaatcttaacaacttactgcaggagtaccgttcaaaggaagttatagaccataactgtgttctgactaggcaattgtctggaagtttcatacatgtggtcatgagtcaatatggagttgtgataattagcaaaaaaagtaaaagatatacaatgtgtacttataaccaattcctaacctggaaggaccttgccttgagcagatttaatgccaattatgtggtctggctaagtaatgtgttaaacacactcaacgaggggttgggattaaggtgtagattaaaaggtcatctgctcagtaagttgtacatttccactgacatctttttatcttcaacatctaatgaattttataatgtggtcaaggaatttgagggcttcatcatgtcactgatattgaaacaaactgaggaagccttatttagcacaaggttttataataacatgttgaacaacttaattgatgccattgatagggctcgactagagtatctggcccgctgtgccaattcagctgccaggattaatttacctagtacagatgttatgatagcatcattgggtgatatcttatctttgataaacgttttaggtgaatccaaccttaacaacttaagtgagttatattttatcttcaggatatttggtcaccctatggttgatgagaggaaggccatggatgcagtcagagataactgttgtgaaacaaagtttctgacggctaagaaccttgcatcgttaagaggagcatatgtttatagaattatcaaaggattcgtagcaaattataacaggtggccttacataaaaactagagtttgccttacaccaacatggattaactatcttgacaccaattcatgtccctcattattagagatgacagaagatgattttattgtgttagctggagtgcactttataagagaattccacatcccaaagctaactgatctggagattatattaaatgacaaggccatatctcctccaaaatcactcatttggtcatgctttccaaaaaactacatacctcaggttatacaagatgagtatgcccggaggtattgtagagctaaagcacctttgaagacaagacgtgtcttggagttctacttacaggacaaggatttcaagttggatcagctccatagagtagtagtgaaccaggactaccttaatgataaagaacatataatttctttaacaggaaaagaaagagagttgggtgttggtaggatgtttgccatgcaacctgggaagcagaggcaagtccaaattttagcagagaagctgttggctgataacatcctgcaattctttccggagacactgactagatacggtgatttggagctgcaaaagatactagagttaaaagctggactttcaaataaaaatgacagatctaaagactcctacaataattatataagtaggtgctcattaattactgatttaagtaaatttaaccaagcttttaggtacgagtcatcctgtgtgtgtagtgatcttttagatgagctacatgggactcaaagcttattctcttggctgcatttaacagtaccactgactactataatgtgtacatataggcatgcgccgccggacactggaaacaactataatgtagatgatattgctgagcagagtggactctaccgctaccacatgggcgggattgagggctggtgccagaagctctggacaacagaggccattgctttgctagatactgtagctgtgaagggccgtttccagctaacttcattaataaatggcgacaaccaaagtattgatatttcaaaaccaacaaggctggggaccaggactcaaagtgaagcagattatgatttggcaataaattctttaagattaatatcagcagcttataaaggcattggacataaattaaaagaaggtgagacctacttgtcacgtgacatgcagttcatgagtaaaacaatacaacatgaaggggtctactacccggcctccatcaagaaaatattaagagttggtccctggatcaacacaatattagatgatataaaaacttcaacagaaagtattggttctctaactcaagaactagaatataaaggtgaaagtttaatgagcagcctgctgctgaggaacttctggctctacagattatattcagtggatttaaaagatcattctttgtgtggaaagcagctctacagatccttaataaaagtgttaaaacatttgaagaggtgcttcaacctggagaaccttggggaatgtttggaattatttttaaatgtgcccatgcagtttggaggtgctgacccaaatgtcatctacaggagcttctacagaagaactccagattttctaacagaaagtataactcatctcatcctcattttaaaacattttagaagagatttggaattcaacaaagataatgtctccaaagctgttctttctttgctagagttcaccaagaatgattctgcagaatttgtaactttgatgagagatcctcaagcaattggtagtgagaggcaggccaagatcacttcagacatcaacagaacagctgtaacttcagtgttatcaaatgctccaaatgaaatatttagaacttcagctcttcattacagcagcacagaaaatgaattaaatggaatagcaagtggagtttctcctgtttatcctcatggtcttcgagttttatatgaaagtttacctttttataaagcagagaagattgtcaacatggtttctgggaccaagtccatcaccaacatactggagaagacatcagccatctcctacacagatataattcgagccaccaacatgatggtggagaacctcactttgctaacaagaataatgaaaccaggtgctgacacatctttggatcctgacacaatagtaataacaatattatcaaaaataataagagataaatcctgggatgttggtgatataattggtgtcacttccccatctcctgtctcctgcttcaaggtggtctacacatcaactctacaaaataattcagtagtaatagaaagatacacaacagacacctacacaagaggtaagagaggccccaccaagccctgggtgggcagcagcacacaggagaagaagtccatgcctgtctacaacagacaagttttaacaagaggacaaagagatcaaatagaaaatatagcaaagctggagtgggtgttttcttcagtagcaaatattgattctttgctaaatgagctcagcaccatgactttgggtctttctctaaggaaatgtagacaactttttccaacatatttaagtttaaacttcctgcacaggctttctgtcagcagcaggcccagagaatatccttcttctcttcctgcctacaggacaacaaattttcattttgatactggaccaataaataaagtgttaacagaaagatttggagatgaagatataaatttggtatttcaaaatgcaatatcatatggtctttccaccatgtctttggtggagcagtttactggtgtctgtccaaataaagttttgctggtgcccaagctacaagaaatacaactaatgaaagttccaatatttcaaggtggcttcaacctacaaagtataattccaataataaggcagcagcacatgttcctgcccaaccacatcactccagcccagtatattgaattatttctttcttcaaaacaatttcattcaagaataaatttaaaacacaacaacagatttaaacttgttttacaaaaagattattttaatggggagaacatgatagaaactttgtccacctgtttggcaggccactggatcatcattttgatgctaatgaaggagagtcaggggatatttgacaaggagtggtatgatggttttgtaacagaccacatgttcctggacctgcagctcttcctctcctccttcaagacatttctaactgtcttcaactttgcttatttaaaagttggttcaaatatagaagaaataacaggaaatcaagccaacctgctggagctgctggacctgggctactggaagaacatgtataaagtattttcagagaccaaggtgcggctggctttgctaaaacaagatttatcatttaattctgtgaagaacagcagcagcttccggcactggtttataaattctctacaagaagtacaatgtacttctgtgccttgggtggtaaatgtaacaagaaatccaactcatttaaaaggtgttctacagtacatgaagatgatagaaagtggcatgattcaaggttattcagcaaatatttcttcagttttaagtatcccatataattatccagacatggcgcacatgatgacaaaaataataagaaatcgaggccacatgtcctatgattatccaaagatgaagaaaagtttaactttctccatgacagacatgagtgacagctacatgctcaacctcttccccaaagtagaatgttcttacatgagtggttatttggataaactagatgatactctacaacttctaaagaaacctcctgttggaagaaaagttccttctgtggctttgccctggcaccactgcaacagatacaactttgtcttcagcagcacaggctgcaaagtttctgtcattgacatgcttccaaaacatttccgaagaagtaatttaaaagtaatatgttttattggagaaggggcgggcaacctcatgctaagagctgttttggaagttggtggaaatataaaattaatatatagatccttaaaagatcctgatgatcatcatgttcctgtagaatttctaagattaaaaccttgttatccttatattgatactggtggcagtttatctttggcttcaacagatgccaccaacaaggcccactgggattatttacatcttcactggacagatcctttaaatttaatagtatgtgatgcagaaataagtggtgtgaagcactggctaaaaattcttcacaggtggtatgagcacatgacttcctgcaagcactgtttaaaatcagaacatgataaatatttaataataaaatatcatgctcaagatgatttaatagatcttcctcatggtgtcaggctactaaaatgtaacatctgcctgggctccaaactaagtggcagtgagagctacctgctcattggtcttggtctttcaaataaacttcctgtctacagtgaagttcttcattcaaaacttcttttggcagaatgtcatcagtttcatcatccaaaatatttggatgtttctggaataaatacaaatataaaatccttaataccaatgttggattatccaataacttacaacaagatcaccactttgctagaaagtgtgcgggagctttcttcaaataaaaacaagaacaccatgtggattggaagaaatcctgtctaccataataaatggctaaagaggaaatatttcaacattttaaaatggctaaaatactgtatagaacttcctgccttcaggatggattataattcatttgagagaatagaaatgctttatccaaatttaagagatttggtagattctgtttctacttcagagctgaagaaagtaataaaagtaacaggcatcctcttcaggagcaacaccatgtgaattaatatgccaatgctaacatgtcatccccactactttttttgttcaatcactctcagtctagacatgtgagaagatcccaaacccaactgcacccctcccactcgaaatcagttgtagcctcagcagctccatctgccatgatctctgaccagcagcaaatgtattattattttaatttgtctatagttaacaaaaaattgatatctcacaggttgtaaacatagttcttttataattattgttagttaaactattgtgtttgacttcctttgggtatttttttcccgt

SEQ ID NO: 53 - DNA, 21742 bp, synthetic construct
  source 1..21742: mol_type = other DNA
acgcgaaaaaatgcataacaaaactatcaacctgaaaaaagttaggacaagtgaagattgctagtcccaaagaccagaatcatgggctgtaatgtgatgatggagcttgattatggtggacgagctgcatggctggcattccacataaccaactttgataggtcagatttggaaactatcctaagaggtgctagggtgtgcaatacatggcaagatcagagactctccgtgtaccttgtgggaagggattgcaatttgttaagaccatttgtgcaagctgccaaatttatccataatactaggagaggccaaacattaacacattggttcacaaaaaatatcgtgtttagttctacagggcaagagacagagcctcccattgaccccacatgtgagctgttggtagagctgatcagtggttaagatgacagcacattatgtagttaattaaaacaaagggtaggacaagtcctaatgtccacagctatgaacaagttcactcagaccatctctaaacctgccactatcttgaatatttcagacagtgaagagtcgggcgatgaggcaggggtgggcaaggtgtcccgtaccacacagagctcagagaggtggcttgatttgctcattgaaaagttccagccgagcctacaaaacatcactagatacatcaactggaacttcatcaggatctgcaatgataggcttaaaaaagaaaaaatggggtacattgaggccaagcaatatgtggaagacatggcttggatggtgatagcatctgaggcagacagcattgagtggaagtgcataaggaggcaggagaaagtgactggggtgaaatacccaaagttcttctttgtacaacacaaagaggactggattgagtgcacaggatgcattccgtacccaggccatgacttgatctatgatgaggatgatgatgactgagctgactcagatcactccaaccagcagagagatccatagttatagaaaaacattaggataaatacacatcctaggccgccaccatgttcgtgtttctggtgctgctgcctctggtgagctcccagtgcgtgaacctgatcacaaggacccagtcctataccaattccttcacacggggcgtgtactatcccgacaaggtgtttagatctagcgtgctgcactccacacacgatctgtttctgcctttcttttctaacgtgacctggttccacgccatccacgtgagcggcaccaatggcacaaagcggttcgacaatccagctctgccctttaacgatggcgtgtacttcgcctccaccgagaagtctaacatcatcagaggctggatctttggcaccacactggacagcaagacacagtccctgctgatcgtgaacaatgccaccaacgtggtcatcaaggtgtgcgagttccagttttgtaatgatccattcctggacgtgtatcagaagaacaataagtcttggatggagagcgagtttcgcgtgtattcctctgccaacaattgcacatttgagtacgtgtcccagcccttcctgatggacctggagggcaaggagggcaatttcaagaacctgagggagttcgtgtttaagaatatcgatggctacttcaagatctactccaagcacaccccaatcaacctggagcgcgacctgccacagggcttctctgccctggagccactggtggatctgcccatcggcatcaacatcacccggtttcagacactgctggccctgcacagaagctacctgacaccagtcgacagctcctctggatggaccgcaggagctgccgcctactatgtgggctatctgcagcccaggaccttcctgctgaagtacaacgagaatggcaccatcacagacgccgtggattgcgccctggatcccctgtctgagaccaagtgtacactgaagagctttaccgtggagaagggcatctatcagacaagcaatttcagggtgcagcctaccgagtccatcgtgcgctttcccaatatcacaaacctgtgcccttttcacgaggtgttcaacgcaaccaccttcgccagcgtgtacgcctggaataggaagcgcatctccaactgcgtggccgactattctgtgatctacaactttgctccattcttcgcctttaagtgctatggcgtgagccccacaaagctgaatgacctgtgctttaccaacgtgtacgccgattccttcgtgatcaggggcaacgaggtgagccagatcgcccctggccagacaggcaacatcgccgactacaattataagctgcctgacgatttcaccggctgcgtgatcgcctggaactctaacaagctggatagcaaaccgagcggcaactacaattatctgtaccggctgcttagaaagtctaagctgaagccattcgagagggacatctccacagagatctaccaggccggcaacaagccctgcaatggcgtggctggccctaactgttattcccctctgcagagctacggcttcaggccaacatacggcgtgggacatcagccctaccgcgtggtggtgctgtcttttgagctgctgcacgcacctgcaacagtgtgcggaccaaagaagagcaccaatctggtgaagaacaagtgcgtgaacttcaacttcaacggactgaccggcacaggcgtgctgaccgagtccaacaagaagttcctgccttttcagcagttcggcagggacatcgcagataccacagacgccgtgcgcgaccctcagaccctggagatcctggatatcacaccatgctccttcggcggcgtgtctgtgatcacaccaggcaccaatacaagcaaccaggtggccgtgctgtatcagggcgtgaattgtaccgaggtgcccgtggcaatccacgcagatcagctgacccctacatggcgggtgtactctaccggcagcaacgtgttccagacaagagccggatgcctgatcggagccgagtacgtgaacaatagctatgagtgcgacatccctatcggcgccggcatctgtgcctcctaccagacccagacaaagtcccacgggtctgcctcctctgtggccagccagtccatcatcgcctataccatgagcctgggcgccgagaattccgtggcctactccaacaattctatcgccatccctaccaacttcacaatctccgtgaccacagagatcctgccagtgagcatgaccaagacatccgtggactgcacaatgtatatctgtggcgattccaccgagtgctctaacctgctgctgcagtacggctctttttgtacccagctgaagagagccctgacaggcatcgccgtggagcaggacaagaacacacaggaggtgttcgcccaggtgaagcagatctacaagaccccacccatcaagtactttggcggcttcaacttcagccagatcctgcccgatcctagcaagccatccaagcggtcttttatcgaggacctgctgttcaacaaggtgaccctggccgatgccggcttcatcaagcagtatggcgattgcctgggcgacatcgccgccagagacctgatctgtgcccagaagtttaatggcctgaccgtgctgcctccactgctgacagatgagatgatcgcccagtacacatctgccctgctggccggcaccatcacaagcggatggaccttcggcgcaggagccgccctgcagatcccctttgccatgcagatggcctatcggttcaacggcatcggcgtgacccagaatgtgctgtacgagaaccagaagctgatcgccaatcagtttaactccgccatcggcaagatccaggactctctgagctccacagccagcgccctgggcaagctgcaggatgtggtgaatcacaacgcccaggccctgaataccctggtgaagcagctgtctagcaagttcggcgccatctcctctgtgctgaatgatatcctgagcaggctggaccctccagaggcagaggtgcagatcgaccggctgatcacaggcagactgcagtccctgcagacctacgtgacacagcagctgatcagggcagcagagatcagggcctctgccaatctggccgccaccaagatgagcgagtgcgtgctgggccagtccaagagagtggacttttgtggcaagggctatcacctgatgagcttcccacagtccgcccctcacggagtggtgtttctgcacgtgacctacgtgccagcccaggagaagaacttcaccacagcaccagcaatctgccacgatggcaaggcacactttcctagggagggcgtgttcgtgagcaacggcacccactggtttgtgacacagcgcaatttctacgagccacagatcatcaccacagacaatacattcgtgtccggcaactgtgacgtggtcatcggcatcgtgaacaataccgtgtatgatcctctgcagccagagctggactcttttaaggaggagctggataagtacttcaagaatcacaccagccccgacgtggatctgggcgacatctctggcatcaatgccagcgtggtgaacatccagaaggagatcgacaggctgaacgaggtggccaagaatctgaacgagtccctgatcgatctgcaggagctgggcaagtatgagcagtacatcaagtggccctggtatatctggctgggcttcatcgccggcctgatcgccatcgtgatggtgaccatcatgctgtgctgtatgacaagctgctgttcctgcctgaagggctgctgttcttgtggcagctgctgtaagtttgatgaggacgatagcgagcctgtgctgaagggcgtgaagctgcactacacctgatagccacctatagcaagtgatgtagtatttagtctatgattagttatagaaaaacattaggataaatacacatcctaggccgggccaaaatgtctctagacagattgaagctcaatgatgtctcaaacaaggatagcctgctgtccaactgcaaatacagtgttaccagatccacaggcgatgtaaccagtgtgtctggtcatgctatgcagaaagcccttgcaaggacactcggcatgttcttacttactgccttcaaccgttgcgaagaagtggcagaaatagggctccaatatgccatgtccttgctaggcagagatgatagcatcaagatattaagagaagccggctacaatgtaaaatgtgtggacacacagctcaaggactttacaatcaaattacaaggaaaggaatacaaaatacaagtcctagatatagtgggaatagatgcagccaatttagctgatctagagatacaagccagaggagtggtagcaaaagaactcaaaacaggagccaggctacctgacaatcggaggcatgatgcaccagattgtggtgtgatagttctctgtattgcagcattagttgtttccaaattagctgcaggggacaggggaggacttgatgctgtggaaagaagggctttaaatgtgctgaaagccgagaaagccaggtaccccaacatggaggtcaagcagatagctgaaagtttttatgatctgtttgaaaggaagccttattacattgatgtcttcatcacttttggcctggcccagtctagtgtcaagggaggcagcaaagttgaggggctgttttcaggtctcttcatgaatgcatacggggcaggacaagttatgctgaggtggggtttactggcaaaatctgtcaagaacatcatgctaggccatgctagtgtacaagctgagatggaacaggtggttgaggtttacgaatatgctcagaagcaaggaggggaggcaggattctatcacatcagaaataatccaaaagcttcacttctctctttgaccaattgtcctaatttcaccagtgttgtgcttggcaatgctgcaggtttaggcatcatagggtcatataagggtgctcctaggaatagagaactctttgatgctgccaaagattatgcagaaagattaaaggacaacaatgtaattaactacagtgcattaaacttgactgcagaagaaagagagctgatcagccagcagctgaacattgttgatgacactcctgatgatgatatttaattaaaactggaaaatgtaggataaatatggagaaattcgcccccgaatttgttggcgaggatgctaacaagaaggcagaggagtttctcaaacatagatccttcccttcggaaaaaccactagctggtataccgaacactgccactcatgtcaccaaatataacatgccccctatattgcgtagctcattcaaactcccttccccgagagttgctgcaaatcttactgaaccctctgctccccctaccactccaccacccacacctccccagaacaaggaagagcagcccaaagagtctgatgttgacattgagactatgcatgtctgtaaggttcctgacaatccggaacacagcaagaagccatgctgctcagatgataccgatactaagaaaactaggaagccgatggtcacctttgtggaacccgaggagaaatttgtcggattgggagctagcttgtacagggagaccatgcagacctttgctgctgatggttatgatgaagaaagcaacctatcgtttgaggagactaaccaagagccgggttcttcatctgtagaacaaagactagatagaatagaggagaaattgtcctacataataggccttttaaacaccataatggtagcgactgctggacctaccactgctagagatgagattagagatgcccttataggcactagagaagaacttattgagatgatcaagtctgacatcttgactgtcaatgacagaatagtggccatggagaagctcagagatgaggaatgctccagagctgacactgatgatggatcagcctgttatttaacagacagagcaaggatactagataagatagtgtccagcaatgctgaagaggctaaggaagatttggatgttgatgacatcatgggcattaatttttagttaattaaaataacaacaggacaaataatggaggcctacttggtagagatgtaccatggtgtcccatatacagctgcagtacagctaaacttggttgaaaaacattcagccaacatatcactaactgtgtggataccgatgtttcaaacatctctaccaaagaactccgttatggacctgctacatgatgttacagtcatttgtacacagatatcaacagtgcatggtcccatgatcaaggtagatctgagctcttccaatgcaggtttagctaccatgccaaggcaattcttgataaatgctatcatagctttggatgactggggcaacatggattacgaagtgcctgttgcttttgataaaaagagcttctgtgtgacaattcttaagcctaaaaacatgctttacactgtacccagcattactcccactaatcgacctactcatgagctgatagctgtctgctctttccataacagggtaacattaaagtcattcaatatacctgtcttcatcagagcactgtctatcagacagcaggaccttgatagtgtggagcaggctataagctccgatgtggaccatgctataacaacagctagggtggctccctatgcagggcttacacttgtgatcaacatcacatccaccaaaggagcattcaaactgctaaaggcaggtagtcagattcttgcagaactgggtccctatctgacgcaggtgagcctacatgatgtgattatgaactggaaacatacaggcacttcctacatactcaagagctcctcaacaagtggatgaaaaagagaaagtcaccattgatcagctcaatccacaactacaaccccacgatttcacacagcacaacaaccaccgccaccaacatccacatgacaaccacacatacacacccacatacatatatacacatatcttagttaaataaaatcaggataaataatggatcctaacatgacctcacaccagatcaccctcgagatcaacatgaccagcagccgtattggcacatacactacaccagccccaacagctcttctccttgcatgtgccgtcatcaacacagtgtgtgcgctgataatggcctgcagcagtagaagcactgccacatcaggcattgtcagcagccaatgcacagttcatcccaatcaccctccaccaagttatggcgtcaatgtaactggtctgccgggtaacctatactcaaggaacactacataacattataaataacagaaattatccttcaataaaccccaggccagacagctttaccctgctagacgattcaatcagcccttgcagtatgtcgtctagttaacaaaaaaccggtaggataagtactatcctattggaaccaaacgagacctgtagagcagctcacacaagagaaccacaagctgacttcacctagtatgggaaggaacttagaagtgagtggcagcattaccaatttgaactttgagagaactcagcatcctgacacatttaggactgttgtaaaagtgaaccaaatgtgtaagcttattgcaggtgtgctcacaagtgctgctgtggcagtttgtgtgggggtcataatgtattctgttttcacatcaaaccacaaggccaactccacgcagaatgccacgacccggaacagcacatccacccctccccaaccaaccgccggtctgcccaccacagagcaagggaccatccccagattcaccaaaccccccaccaaaaccgccacccaccatgagatcacagagcccgtcaaaatggcaacaccttcagaggatccctaccaatgctccagcaatggttatttggaccgacctgatttacctgaaaatttcaaactcgtattggatgttatatgcaagcctccaggtcctgaacatcacaacaccagctgttatgagaaacgtgaaatcaacccaggaagtgtttgccctgatcttgtaacaatgaaggcaaacatgggcttaaacaatggtggtggggaggatgctgcaccttatatagaggttaccaccctttctacgtactccaacaaaagggcaatgtgtgtccacaatgggtgtgatcaaggcttctgtttcttcctttctggtttaagcactgatcaggagagagctgtgctagagcttggaggtcaacaggctatcatggagttgcattatgattcctactggaaacactattggagtaactctaattgtgttgttcccagaacaaactgcaacctgacagaccaaactgagattttgtttcctaggtttaacaacaagaatcagtctcagtgtaccacctgtgcagattcagctggcctagataacaaattttatctcacatgtgatgggcttttaagaaccctccctctagttggactacccagcctaagtcctcaggcttacaaagctgtacccacacaaactacaggcaccaccacggcaccaacatcagagacgaggcacccaacccctgcacccaggaggtccaaacctctcagtcggaagaagagagctttatgtggtgtagactcaagcagagaacccaaaccaacaatgccttactggtgtcctatgctccaattatttccaaggaggtctaattcttaagtgacctattcctgaattaacttcagaataagtaccaaccttatcagtagttaatgaaaactaagctttgatataataggacaaatatgattcctggcaggatctttctagtccttctggtgatcttcaacaccaagccaattcacccaaatacattaacagaaaaattctatgagtccacatgtagtgttgagactgcaggttataagagtgcccttagaacaggttggcatatgacagttatgtcaattaagttgtctcaaataaatattgagtcatgcaagagcagcaactcgttattggctcatgagcttgcaatctatagtagtgcagtggatgaattgagaacgttatcatccaatgccttgaagtccaaaaggaagaagaggttcctcggtttgattcttggtctcggagctgcagtcactgccggggtggctttagccaagacagtgcaacttgaaagtgagattgcattgattagagatgcagtgagaaatacaaatgaggctgttgttagcctaaccaacggcatgtcagtgttggctaaagtggtggatgatttgaaaaacttcatatctaaagaattactcccaaaaataaaccgagtctcttgtgatgtgcacgacatcactgccgtcattagattccaacagctcaacaaaagacttttggaagtatctcgtgaattttcatctaatgcaggattaacacacactgtttcatcttttatgttaacagaccgggaactcacctccattgtaggcggcatggctgtttcagcaggccaaaaagagataatgctatctagcaaagctataatgagaagaaatgggttagcaatattaagttcagtcaacgctgacacactggtttatgtaatacaactcccattatttggtgttatggacacagattgttgggtaataagaagttctatagactgtcataacatagcagacaagtatgcttgtttggctagagctgataatggctggtattgtcacaatgctggctcattatcatacttcccgtcgccaacggattgtgagatccacaatgggtatgctttctgtgacactctaaaaagtctaactgtacctgtaacatcacgagaatgcaactcaaacatgtataccactaactacgattgtaagatttccacaagtaaaacttatgtgagtacagcggtactgactacaatgggttgcttggtatcttgttatggtcataacagttgcacagtcatcaataatgacaaaggtataataaggactctgccagatggttgccactacatctccaacaaaggtgtggacagggttcaagtaggtaacactgtttactatcttagcaaagaagttggcaagtcaattgttgtcagaggggaaccattggtcttgaaatatgaccctttgagtttccctgacgataaatttgatgttgctataagagatgtggagcatagcatcaatcagacacgcacattcttgaaggcctctgatcagttattggacttaagtgaaaacagagagaataaaaatttaaacaagtcatatatactaacaactctgctcttcgttgtaatgcttattataataatggctgtcatagggttcattctgtataaggtattgaaaatgatcagagacaacaagttgaaatccaaaagtacacctggcctcacagttttatcatgacaattgtaccaaaccataattgagttagttaattaaaaacttaggataagtgacaatccagacccaacacctctttcaactctcaaggataaggtaggatgagtgtgagaccttgcaaatttgaggttcaagggttttgttccagagggaggaattgcaagtatagtcataaatattgggaatggcctttgaaaactcttatgctcaggcagaactacatgcttaataggatttataggttcctcgacaccaacacagatgcaatgtcagatgtcagcggatttgatgcaccacaaaggactgctgagtatgccttgggaaccataggtgtgctgaaaagttacctggaaaaaactaacaacatcactaaatcaatagcttgtggcagtttgatcactgtattgcagaacttggatgttggtctagtaatacaagcaagagatagcaacactgaggacaccaattacttgagaagttgcaacactatactgtcttatatagacaagatacacaagaagagacaaattattcacattctcaaaagactgccagtaggagtactatgcaatctgatccaatctgtcatctccatcgaggagaagataaattcttctatgaaaacagaatgataaggctgcctaaatactatccagccatactgcataagatgtatattattagagtaaatagaaacctcacttacgatgggtctggaccatccacaataatagatgcaggaaagtctgtggtgtggaatcgtgttgatgtgatagcttgtgtgaaagaggccttgtgctgcatagaattcagctggaataaccaagtgatcatagactttgattatagccaggccagatgatgtggactgtattcctttttttgtcagtaatcagttattaacccaaaattgttaattatgtagactttaagttaactaacttcatgttaattcaatagttatataaaaaaatattcgaattaggatcaatatggatcctattgatgaacaagaagttaatgtgtacttgccggatagctacttaaagggtgttatatcttttagtgaaactaatgctcttggcagctgtatcattggtagacctttcttgaaggatgactttactgccactacttcaatccgtaaccccctaattgaacataaaagaataagggacactaaattagtaaaaaatattgtttcaaaccctcaatataggttagtggagcctctccaaatgcagcatgagctcttgagtgtactatcgcccaatttcatattgcacactgccaacttaaggaaaattatacaaagaagtgttgacataacagataaaaagttgaaccccattttgcacattttgaatcttaattctcctaaccaagagggtaaggtgtcggaacggctaactaggctaattaagaaacatctctctcacatacctaattgggtaagcagctggtacaatatatgggtcaatcttaacaacttactgcaggagtaccgttcaaaggaagttatagaccataactgtgttctgactaggcaattgtctggaagtttcatacatgtggtcatgagtcaatatggagttgtgataattagcaaaaaaagtaaaagatatacaatgtgtacttataaccaattcctaacctggaaggaccttgccttgagcagatttaatgccaattatgtggtctggctaagtaatgtgttaaacacactcaacgaggggttgggattaaggtgtagattaaaaggtcatctgctcagtaagttgtacatttccactgacatctttttatcttcaacatctaatgaattttataatgtggtcaaggaatttgagggcttcatcatgtcactgatattgaaacaaactgaggaagccttatttagcacaaggttttataataacatgttgaacaacttaattgatgccattgatagggctcgactagagtatctggcccgctgtgccaattcagctgccaggattaatttacctagtacagatgttatgatagcatcattgggtgatatcttatctttgataaacgttttaggtgaatccaaccttaacaacttaagtgagttatattttatcttcaggatatttggtcaccctatggttgatgagaggaaggccatggatgcagtcagagataactgttgtgaaacaaagtttctgacggctaagaaccttgcatcgttaagaggagcatatgtttatagaattatcaaaggattcgtagcaaattataacaggtggccttacataaaaactagagtttgccttacaccaacatggattaactatcttgacaccaattcatgtccctcattattagagatgacagaagatgattttattgtgttagctggagtgcactttataagagaattccacatcccaaagctaactgatctggagattatattaaatgacaaggccatatctcctccaaaatcactcatttggtcatgctttccaaaaaactacatacctcaggttatacaagatgagtatgcccggaggtattgtagagctaaagcacctttgaagacaagacgtgtcttggagttctacttacaggacaaggatttcaagttggatcagctccatagagtagtagtgaaccaggactaccttaatgataaagaacatataatttctttaacaggaaaagaaagagagttgggtgttggtaggatgtttgccatgcaacctgggaagcagaggcaagtccaaattttagcagagaagctgttggctgataacatcctgcaattctttccggagacactgactagatacggtgatttggagctgcaaaagatactagagttaaaagctggactttcaaataaaaatgacagatctaaagactcctacaataattatataagtaggtgctcattaattactgatttaagtaaatttaaccaagcttttaggtacgagtcatcctgtgtgtgtagtgatcttttagatgagctacatgggactcaaagcttattctcttggctgcatttaacagtaccactgactactataatgtgtacatataggcatgcgccgccggacactggaaacaactataatgtagatgatattgctgagcagagtggactctaccgctaccacatgggcgggattgagggctggtgccagaagctctggacaacagaggccattgctttgctagatactgtagctgtgaagggccgtttccagctaacttcattaataaatggcgacaaccaaagtattgatatttcaaaaccaacaaggctggggaccaggactcaaagtgaagcagattatgatttggcaataaattctttaagattaatatcagcagcttataaaggcattggacataaattaaaagaaggtgagacctacttgtcacgtgacatgcagttcatgagtaaaacaatacaacatgaaggggtctactacccggcctccatcaagaaaatattaagagttggtccctggatcaacacaatattagatgatataaaaacttcaacagaaagtattggttctctaactcaagaactagaatataaaggtgaaagtttaatgagcagcctgctgctgaggaacttctggctctacagattatattcagtggatttaaaagatcattctttgtgtggaaagcagctctacagatccttaataaaagtgttaaaacatttgaagaggtgcttcaacctggagaaccttggggaatgtttggaattatttttaaatgtgcccatgcagtttggaggtgctgacccaaatgtcatctacaggagcttctacagaagaactccagattttctaacagaaagtataactcatctcatcctcattttaaaacattttagaagagatttggaattcaacaaagataatgtctccaaagctgttctttctttgctagagttcaccaagaatgattctgcagaatttgtaactttgatgagagatcctcaagcaattggtagtgagaggcaggccaagatcacttcagacatcaacagaacagctgtaacttcagtgttatcaaatgctccaaatgaaatatttagaacttcagctcttcattacagcagcacagaaaatgaattaaatggaatagcaagtggagtttctcctgtttatcctcatggtcttcgagttttatatgaaagtttacctttttataaagcagagaagattgtcaacatggtttctgggaccaagtccatcaccaacatactggagaagacatcagccatctcctacacagatataattcgagccaccaacatgatggtggagaacctcactttgctaacaagaataatgaaaccaggtgctgacacatctttggatcctgacacaatagtaataacaatattatcaaaaataataagagataaatcctgggatgttggtgatataattggtgtcacttccccatctcctgtctcctgcttcaaggtggtctacacatcaactctacaaaataattcagtagtaatagaaagatacacaacagacacctacacaagaggtaagagaggccccaccaagccctgggtgggcagcagcacacaggagaagaagtccatgcctgtctacaacagacaagttttaacaagaggacaaagagatcaaatagaaaatatagcaaagctggagtgggtgttttcttcagtagcaaatattgattctttgctaaatgagctcagcaccatgactttgggtctttctctaaggaaatgtagacaactttttccaacatatttaagtttaaacttcctgcacaggctttctgtcagcagcaggcccagagaatatccttcttctcttcctgcctacaggacaacaaattttcattttgatactggaccaataaataaagtgttaacagaaagatttggagatgaagatataaatttggtatttcaaaatgcaatatcatatggtctttccaccatgtctttggtggagcagtttactggtgtctgtccaaataaagttttgctggtgcccaagctacaagaaatacaactaatgaaagttccaatatttcaaggtggcttcaacctacaaagtataattccaataataaggcagcagcacatgttcctgcccaaccacatcactccagcccagtatattgaattatttctttcttcaaaacaatttcattcaagaataaatttaaaacacaacaacagatttaaacttgttttacaaaaagattattttaatggggagaacatgatagaaactttgtccacctgtttggcaggccactggatcatcattttgatgctaatgaaggagagtcaggggatatttgacaaggagtggtatgatggttttgtaacagaccacatgttcctggacctgcagctcttcctctcctccttcaagacatttctaactgtcttcaactttgcttatttaaaagttggttcaaatatagaagaaataacaggaaatcaagccaacctgctggagctgctggacctgggctactggaagaacatgtataaagtattttcagagaccaaggtgcggctggctttgctaaaacaagatttatcatttaattctgtgaagaacagcagcagcttccggcactggtttataaattctctacaagaagtacaatgtacttctgtgccttgggtggtaaatgtaacaagaaatccaactcatttaaaaggtgttctacagtacatgaagatgatagaaagtggcatgattcaaggttattcagcaaatatttcttcagttttaagtatcccatataattatccagacatggcgcacatgatgacaaaaataataagaaatcgaggccacatgtcctatgattatccaaagatgaagaaaagtttaactttctccatgacagacatgagtgacagctacatgctcaacctcttccccaaagtagaatgttcttacatgagtggttatttggataaactagatgatactctacaacttctaaagaaacctcctgttggaagaaaagttccttctgtggctttgccctggcaccactgcaacagatacaactttgtcttcagcagcacaggctgcaaagtttctgtcattgacatgcttccaaaacatttccgaagaagtaatttaaaagtaatatgttttattggagaaggggcgggcaacctcatgctaagagctgttttggaagttggtggaaatataaaattaatatatagatccttaaaagatcctgatgatcatcatgttcctgtagaatttctaagattaaaaccttgttatccttatattgatactggtggcagtttatctttggcttcaacagatgccaccaacaaggcccactgggattatttacatcttcactggacagatcctttaaatttaatagtatgtgatgcagaaataagtggtgtgaagcactggctaaaaattcttcacaggtggtatgagcacatgacttcctgcaagcactgtttaaaatcagaacatgataaatatttaataataaaatatcatgctcaagatgatttaatagatcttcctcatggtgtcaggctactaaaatgtaacatctgcctgggctccaaactaagtggcagtgagagctacctgctcattggtcttggtctttcaaataaacttcctgtctacagtgaagttcttcattcaaaacttcttttggcagaatgtcatcagtttcatcatccaaaatatttggatgtttctggaataaatacaaatataaaatccttaataccaatgttggattatccaataacttacaacaagatcaccactttgctagaaagtgtgcgggagctttcttcaaataaaaacaagaacaccatgtggattggaagaaatcctgtctaccataataaatggctaaagaggaaatatttcaacattttaaaatggctaaaatactgtatagaacttcctgccttcaggatggattataattcatttgagagaatagaaatgctttatccaaatttaagagatttggtagattctgtttctacttcagagctgaagaaagtaataaaagtaacaggcatcctcttcaggagcaacaccatgtgaattaatatgccaatgctaacatgtcatccccactactttttttgttcaatcactctcagtctagacatgtgagaagatcccaaacccaactgcacccctcccactcgaaatcagttgtagcctcagcagctccatctgccatgatctctgaccagcagcaaatgtattattattttaatttgtctatagttaacaaaaaattgatatctcacaggttgtaaacatagttcttttataattattgttagttaaactattgtgtttgacttcctttgggtatttttttcccgtgggtcggcatggcatctccacctcctcgcggtccgacctgggcatccgaaggaggacgcacgtccactcggatggctaagggagagcctgcagtagcataaccccttggggcctctaaacgggtcttgaggggttttttgctgaaaggaggaactatatacgcgtcgacgggcccgcgctcactggccgtcgttttacaacgtcgtgactgggaaaaccctggcgttacccaacttaatcgccttgcagcacatccccctttcgccagctggcgtaatagcgaagaggcccgcaccgatcgcccttcccaacagttgcgcagcctgaatggcgaatgggacgcgccctgtagcggcgcattaagcgcggcgggtgtggtggttacgcgcagcgtgaccgctacacttgccagcgccctagcgcccgctcctttcgctttcttcccttcctttctcgccacgttcgccggctttccccgtcaagctctaaatcgggggctccctttagggttccgatttagtgctttacggcacctcgaccccaaaaaacttgattagggtgatggttcacgtagtgggccatcgccctgatagacggtttttcgccctttgacgttggagtccacgttctttaatagtggactcttgttccaaactggaacaacactcaaccctatctcggtctattcttttgatttataagggattttgccgatttcggcctattggttaaaaaatgagctgatttaacaaaaatttaacgcgaattttaacaaaatattaacgcttacaatttaggtggcacttttcggggaaatgtgcgcggaacccctatttgtttatttttctaaatacattcaaatatgtatccgctcatgagacaataaccctgataaatgcttcaataatattgaaaaaggaagagtatgagtattcaacatttccgtgtcgcccttattcccttttttgcggcattttgccttcctgtttttgctcacccagaaacgctggtgaaagtaaaagatgctgaagatcagttgggtgcacgagtgggttacatcgaactggatctcaacagcggtaagatccttgagagttttcgccccgaagaacgttttccaatgatgagcacttttaaagttctgctatgtggcgcggtattatcccgtattgacgccgggcaagagcaactcggtcgccgcatacactattctcagaatgacttggttgagtactcaccagtcacagaaaagcatcttacggatggcatgacagtaagagaattatgcagtgctgccataaccatgagtgataacactgcggccaacttacttctgacaacgatcggaggaccgaaggagctaaccgcttttttgcacaacatgggggatcatgtaactcgccttgatcgttgggaaccggagctgaatgaagccataccaaacgacgagcgtgacaccacgatgcctgtagcaatggcaacaacgttgcgcaaactattaactggcgaactacttactctagcttcccggcaacaattaatagactggatggaggcggataaagttgcaggaccacttctgcgctcggcccttccggctggctggtttattgctgataaatctggagccggtgagcgtgggtctcgcggtatcattgcagcactggggccagatggtaagccctcccgtatcgtagttatctacacgacggggagtcaggcaactatggatgaacgaaatagacagatcgctgagataggtgcctcactgattaagcattggtaactgtcagaccaagtttactcatatatactttagattgatttaaaacttcatttttaatttaaaaggatctaggtgaagatcctttttgataatctcatgaccaaaatcccttaacgtgagttttcgttccactgagcgtcagaccccgtagaaaagatcaaaggatcttcttgagatcctttttttctgcgcgtaatctgctgcttgcaaacaaaaaaaccaccgctaccagcggtggtttgtttgccggatcaagagctaccaactctttttccgaaggtaactggcttcagcagagcgcagataccaaatactgtccttctagtgtagccgtagttaggccaccacttcaagaactctgtagcaccgcctacatacctcgctctgctaatcctgttaccagtggctgctgccagtggcgataagtcgtgtcttaccgggttggactcaagacgatagttaccggataaggcgcagcggtcgggctgaacggggggttcgtgcacacagcccagcttggagcgaacgacctacaccgaactgagatacctacagcgtgagctatgagaaagcgccacgcttcccgaagggagaaaggcggacaggtatccggtaagcggcagggtcggaacaggagagcgcacgagggagcttccagggggaaacgcctggtatctttatagtcctgtcgggtttcgccacctctgacttgagcgtcgatttttgtgatgctcgtcaggggggcggagcctatggaaaaacgccagcaacgcggcctttttacggttcctggccttttgctggccttttgctcacatgttctttcctgcgttatcccctgattctgtggataaccgtattaccgcctttgagtgagctgataccgctcgccgcagccgaacgaccgagcgcagcgagtcagtgagcgaggaagcggaagagcgcccaatacgcaaaccgcctctccccgcgcgttggccgattcattaatgcagctggcacgacaggtttcccgactggaaagcgggcagtgagcgcaacgcaattaatgtgagttagctcactcattaggcaccccaggctttacactttatgcttccggctcgtatgttgtgtggaattgtgagcggataacaatttcacacaggaaacagctatgaccatgattacgccaagcgcgcccgggtaatacgactcactataggg

SEQ ID NO: 54 - protein, 1269 aa, synthetic construct
MFVFLVLLPLVSSQCVNLITRTQSYTNSFTRGVYYPDKVFRSSVLHSTQDLFLPFFSNVTWFHAIHVSGTNGTKRFDNPALPFNDGVYFASTEKSNIIRGWIFGTTLDSKTQSLLIVNNATNVVIKVCEFQFCNDPFLDVYQKNNKSWMESEFRVYSSANNCTFEYVSQPFLMDLEGKEGNFKNLREFVFKNIDGYFKIYSKHTPINLERDLPQGFSALEPLVDLPIGINITRFQTLLALHRSYLTPVDSSSGWTAGAAAYYVGYLQPRTFLLKYNENGTITDAVDCALDPLSETKCTLKSFTVEKGIYQTSNFRVQPTESIVRFPNITNLCPFHEVFNATTFASVYAWNRKRISNCVADYSVIYNFAPFFAFKCYGVSPTKLNDLCFTNVYADSFVIRGNEVSQIAPGQTGNIADYNYKLPDDFTGCVIAWNSNKLDSKPSGNYNYLYRLFRKSKLKPFERDISTEIYQAGNKPCNGVAGPNCYSPLQSYGFRPTYGVGHQPYRVVVLSFELLHAPATVCGPKKSTNLVKNKCVNFNFNGLTGTGVLTESNKKFLPFQQFGRDIADTTDAVRDPQTLEILDITPCSFGGVSVITPGTNTSNQVAVLYQGVNCTEVPVAIHADQLTPTWRVYSTGSNVFQTRAGCLIGAEYVNNSYECDIPIGAGICASYQTQTKSHGSASSVASQSIIAYTMSLGAENSVAYSNNSIAIPTNFTISVTTEILPVSMTKTSVDCTMYICGDSTECSNLLLQYGSFCTQLKRALTGIAVEQDKNTQEVFAQVKQIYKTPPIKYFGGFNFSQILPDPSKPSKRSFIEDLLFNKVTLADAGFIKQYGDCLGDIAARDLICAQKFNGLTVLPPLLTDEMIAQYTSALLAGTITSGWTFGAGAALQIPFAMQMAYRFNGIGVTQNVLYENQKLIANQFNSAIGKIQDSLSSTASALGKLQDVVNHNAQALNTLVKQLSSKFGAISSVLNDILSRLDPPEAEVQIDRLITGRLQSLQTYVTQQLIRAAEIRASANLAATKMSECVLGQSKRVDFCGKGYHLMSFPQSAPHGVVFLHVTYVPAQEKNFTTAPAICHDGKAHFPREGVFVSNGTHWFVTQRNFYEPQIITTDNTFVSGNCDVVIGIVNNTVYDPLQPELDSFKEELDKYFKNHTSPDVDLGDISGINASVVNIQKEIDRLNEVAKNLNESLIDLQELGKYEQYIKWPWYIWLGFIAGLIAIVMVTIMLCCMTSCCSCLKGCCSCGSCCKFDEDDSEPVLKGVKLHYT

SEQ ID NO: 55 - protein, 1269 aa, synthetic construct
MFVFLVLLPLVSSQCVNLITRTQSYTNSFTRGVYYPDKVFRSSVLHSTHDLFLPFFSNVTWFHAIHVSGTNGTKRFDNPALPFNDGVYFASTEKSNIIRGWIFGTTLDSKTQSLLIVNNATNVVIKVCEFQFCNDPFLDVYQKNNKSWMESEFRVYSSANNCTFEYVSQPFLMDLEGKEGNFKNLREFVFKNIDGYFKIYSKHTPINLERDLPQGFSALEPLVDLPIGINITRFQTLLALHRSYLTPVDSSSGWTAGAAAYYVGYLQPRTFLLKYNENGTITDAVDCALDPLSETKCTLKSFTVEKGIYQTSNFRVQPTESIVRFPNITNLCPFHEVFNATTFASVYAWNRKRISNCVADYSVIYNFAPFFAFKCYGVSPTKLNDLCFTNVYADSFVIRGNEVSQIAPGQTGNIADYNYKLPDDFTGCVIAWNSNKLDSKPSGNYNYLYRLLRKSKLKPFERDISTEIYQAGNKPCNGVAGPNCYSPLQSYGFRPTYGVGHQPYRVVVLSFELLHAPATVCGPKKSTNLVKNKCVNFNFNGLTGTGVLTESNKKFLPFQQFGRDIADTTDAVRDPQTLEILDITPCSFGGVSVITPGTNTSNQVAVLYQGVNCTEVPVAIHADQLTPTWRVYSTGSNVFQTRAGCLIGAEYVNNSYECDIPIGAGICASYQTQTKSHGSASSVASQSIIAYTMSLGAENSVAYSNNSIAIPTNFTISVTTEILPVSMTKTSVDCTMYICGDSTECSNLLLQYGSFCTQLKRALTGIAVEQDKNTQEVFAQVKQIYKTPPIKYFGGFNFSQILPDPSKPSKRSFIEDLLFNKVTLADAGFIKQYGDCLGDIAARDLICAQKFNGLTVLPPLLTDEMIAQYTSALLAGTITSGWTFGAGAALQIPFAMQMAYRFNGIGVTQNVLYENQKLIANQFNSAIGKIQDSLSSTASALGKLQDVVNHNAQALNTLVKQLSSKFGAISSVLNDILSRLDPPEAEVQIDRLITGRLQSLQTYVTQQLIRAAEIRASANLAATKMSECVLGQSKRVDFCGKGYHLMSFPQSAPHGVVFLHVTYVPAQEKNFTTAPAICHDGKAHFPREGVFVSNGTHWFVTQRNFYEPQIITTDNTFVSGNCDVVIGIVNNTVYDPLQPELDSFKEELDKYFKNHTSPDVDLGDISGINASVVNIQKEIDRLNEVAKNLNESLIDLQELGKYEQYIKWPWYIWLGFIAGLIAIVMVTIMLCCMTSCCSCLKGCCSCGSCCKFDEDDSEPVLKGVKLHYT